(19) United States
(12) Patent Application Publication
(10) Pub. No.: US 2015/0087539 A1
(43) Pub. Date: Mar. 26, 2015

(54) METHOD FOR PREDICTING OUTCOME OF CANCER IN A SUBJECT

(71) Applicant: Juan Carlos Lacal Sanjuan, Madrid (ES)

(72) Inventor: Juan Carlos Lacal Sanjuan, Madrid (ES)

(73) Assignee: TRASLATIONAL CANCER DRUGS PHARMA, S.L., Valladolid (ES)

(21) Appl. No.: 14/232,860

(22) PCT Filed: Jul. 13, 2012
(86) PCT No.: PCT/EP12/63751

§ 371 Date: Sep. 2, 2014

Related U.S. Application Data
(60) Provisional application No. 61/525,367, filed on Aug. 19, 2011.

(30) Foreign Application Priority Data
Jul. 14, 2011 (EP) 11382238.1

(51) Int. Cl. C12Q 1/68

(52) U.S. Cl. CPC C12Q 1/6886; C12Q 2600/16; C12Q 2600/158; C12Q 2600/118
USPC 506/9; 506/16; 435/6.12; 506/7

(57) ABSTRACT

The invention relates to a method for predicting the outcome of a subject suffering from cancer, based on the copy number of the CHKA gene in a sample from said subject. The invention also relates to a BAC composition and a method for detecting the number of copies of the CHKA gene.

### FIELD OF THE INVENTION

[0001] The invention relates to the field of diagnosis and, more in particular, to a method for diagnosing or for predicting the outcome of a subject suffering from cancer, based on the copy number of the choline kinase alpha (CHKA) gene in a sample from said subject. The invention also relates to a bacterial artificial chromosome (BAC) composition and a method for detecting the number of copies of the CHKA gene.

### BACKGROUND OF THE INVENTION

[0002] Cancer is a term used for diseases in which abnormal cells divide without control and are able to invade other tissues. Cancer cells can spread to other parts of the body through the blood and lymph systems. Cancer is not just one disease but many diseases.

[0003] There are more than 100 different types of cancer. Most cancers are named for the organ or type of cell in which they start, for example, cancer that begins in the colon is called colon cancer; cancer that begins in lung is called lung cancer.

[0004] Rates of new diagnoses and rates of death from all cancers combined declined significantly in the most recent time period for men and women overall and for most racial and ethnic populations in the United States, according to a report from leading health and cancer organizations.

[0005] The drops are driven largely by declines in rates of new cases and rates of death for the three most common cancers in men (lung, prostate, and colorectal cancers) and for two of the three leading cancers in women (breast and colorectal cancer). New diagnoses for all types of cancer combined in the United States decreased, on average, almost 1% per year from 1999 to 2006. Cancer deaths decreased 1.6% per year from 2001 to 2006 (Kohler B A et al. Report to the Nation on the Status of Cancer, 1975-2007, Featuring Tumors of the Brain and Other Nervous System. JNCI; May 4, 2011).

[0006] Lung cancer is one of the leading causes of worldwide death, and non-small cell lung cancer (NSCLC) accounts for approximately 85% of all lung cancers, with 1.2 million new cases worldwide each year. NSCLC resulted in more than one million deaths worldwide in 2001 and is the leading cause of cancer-related mortality in both men and women (31% and 25%, respectively).

[0007] NSCLC comprises a group of heterogeneous diseases grouped together because their prognosis and management is roughly identical. However, the following subtypes based on their histology can be identified: (i) squamous cell carcinoma (SCC), accounting for 30% to 40% of NSCLC, starts in the larger breathing tubes but grows slower meaning that the size of these tumours varies on diagnosis, (ii) adenocarcinoma is the most common subtype of NSCLC, accounting for 50% to 60% of NSCLC, which starts near the gas-exchanging surface of the lung and which includes a subtype, the bronchioalveolar carcinoma, which may have different responses to treatment and (iii) large cell carcinoma is a fast-growing form that grows near the surface of the lung. It is primarily a diagnosis of exclusion, and when more investigation is done, it is usually reclassified to squamous cell carcinoma or adenocarcinoma.

[0008] A common characteristic of human tumour cell lines is the high basal levels of phosphocholine (PCho) as consequence of CHKA overexpression. This parameter is able to distinguish between normal and tumour cell lines, independently of their proliferative status. These results have been confirmed in different human tumours, including breast, lung, colon, bladder, prostate tumours (Ramirez de Molina A et al. Oncogene 21: 4317-4322, 2002), brain (Nelson S J et al. Neoplasia 2: 166-189, 2000) and ovary (Ramoni C, et al. Cancer Res. 65: 9369-9376, 2005). In all of them, high levels of ChoK activity and PCho can be observed. These biochemical discoveries suggest that CHKA could be a potential tumour marker in a wide variety of human cancers. Moreover, it has recently been demonstrated that CHKA over expression in the human cell line HMEC (Human Mammary Epithelial Cells) provokes an induction of DNA synthesis and also that breast cancer cells need ChoK activity for their proliferation, supporting a strong link between CHKA and tumour progression (Ramirez de Molina et al. 2004. Cancer Research 64, 6732-6739). Around 50% of lung, colon and prostate tumours show high levels of CHKA. Only 18% of breast cancer tumours show high level of this enzyme; however 38% of these samples present increased enzymatic activity with a mean of 10 fold increase compared to normal tissue.

[0009] Gene amplification is a common mechanism in deregulated oncogene expression, mainly in solid tumours. An example is the tyrosine kinase membrane receptors which regulate signalling pathways of proliferation and apoptosis. Different alterations in the genes which encode these receptors are targets of new therapeutic strategies based on blocking the receptor or the inhibition of its tyrosine kinase activity. Another example is the oncogene HER2 in breast cancer where the copy number amplification is associated to poor outcome and has predictive value for sensitivity and resistance to therapy. This finding has led to the inclusion of the HER2 gene in the clinical panels as a predictive factor of breast cancer (Carlsson et al. Br J Cancer. 2004, 90: 2344-8, Villman et al. Acta Oncol. 2006; 45: 590-6). Another example is the EGFR (Epidermal growth factor receptor) gene in lung cancer. Although common gene alterations consist in small deletions or insertions or point mutations, recent studies have correlated other gene alterations as amplification or EGFR polysomy with the tumour aggressiveness and response of gefitinib (Dacic et al. Am J Clin Pathol. 2006, 125: 860-5). Thus, there is a need in the art for further diagnosis methods for cancer and prognosis methods for predicting the clinical outcome of a patient suffering from cancer, and specifically from NSCLC.

### SUMMARY

[0010] In one aspect, the invention relates to a composition comprising at least two polynucleotides selected from the group consisting of:
[0011] (a) a polynucleotide comprising the human genomic fragment present in the CTD-2162L23 BAC (SEQ ID NO:1) or a variant thereof which hybridizes under stringent conditions to said polynucleotide,
[0012] (b) a polynucleotide comprising the human genomic fragment present in the RP11-314K20 BAC (SEQ ID NO:2) or a variant thereof which hybridizes under stringent conditions to said polynucleotide,
[0013] (c) a polynucleotide comprising the human genomic fragment present in the CTD-2655K5 BAC (SEQ ID NO:3) or a variant thereof which hybridizes under stringent conditions to said polynucleotide and
[0014] (d) a polynucleotide comprising the human genomic fragment present in CTC-783C1 BAC (SEQ ID NO:4) or a variant thereof which hybridizes under stringent conditions to said polynucleotide.

[0015] In another aspect, the invention relates to a method for determining the copy number of the CHKA gene which comprises:
[0016] (a) contacting a sample containing genetic material with a composition according to any of claims 1 to 3 under conditions adequate for the hybridisation of the polynucleotides forming part of the composition with the CHKA gene or genes present in the sample; and
[0017] (b) determining the copy number of the CHKA gene based on the hybridisation of the composition with the sample containing genetic material.

[0018] In yet another aspect, the invention relates to an in vitro method for predicting the outcome of a subject suffering from cancer comprising detecting whether the CHKA gene is amplified in a sample from said subject, wherein amplification of the CHKA gene is indicative of an unfavourable outcome of the subject.

### BRIEF DESCRIPTION OF THE FIGURES

[0019] FIG. 1 shows Kaplan-Meier plots for CHKA copy number and overall survival (A) and CHKA copy number and disease-free survival (B).

### DETAILED DESCRIPTION OF THE INVENTION

[0020] The inventors of the present invention have found that, surprisingly, the copy number of the CHKA gene can be determined by FISH (fluorescent in situ hybridization) using a specific polynucleotide composition. Moreover, the authors of the present invention have also found out that there is a statistically significant correlation between the copy number of the CHKA gene and the prognosis of cancer patient and, in particular, in patients suffering from non-small cell lung cancer (NSCLC). Thus, the determination of the copy number of the CHKA gene is useful for determining the prognosis of a subject suffering from cancer. In this sense, an increased copy number of the CHKA gene correlates with an unfavourable prognosis of the subject suffering from cancer. Based on these findings, the inventors have developed the methods of the present invention in their different embodiments that will be described now in detail.

[0021] Compositions and Kit-of-Parts of the Invention

[0022] The authors have successfully identified a plurality of genomic fragments derived from human chromosome 11q13 that, when used in combination, allow the detection of the amplification of the CHKA gene. Thus, in a first aspect, the invention relates to a composition, hereinafter composition of the invention, comprising at least two polynucleotides selected from the group consisting of:
[0023] (a) a polynucleotide comprising the human genomic fragment present in the CTD-2162L23 BAC or a variant thereof which hybridizes under stringent conditions to said polynucleotide,
[0024] (b) a polynucleotide comprising the human genomic fragment present in the RP11-314K20 BAC or a variant thereof which hybridizes under stringent conditions to said polynucleotide,
[0025] (c) a polynucleotide comprising the human genomic fragment present in the CTD-2655K5 BAC or a variant thereof which hybridizes under stringent conditions to said polynucleotide and
[0026] (d) a polynucleotide comprising the human genomic fragment present in CTC-783C1 BAC or a variant thereof which hybridizes under stringent conditions to said polynucleotide.

[0027] The term “composition”, as used herein, refers to any mixture of two or more polynucleotides according to the invention. It can be a solution, a suspension, an emulsion, liquid, powder, a paste, aqueous, non-aqueous or any combination of such ingredients. The term “composition” has to be understood also as a kit of parts wherein the two or more components of the kit of parts are physically separated. The parts of the kit of parts can then, e.g., be used simultaneously or chronologically staggered, that is at different time points and with equal or different time intervals for any part of the kit of parts. The ratio of the total amounts of the components of the kit to each other being used in the combined preparation/composition can be varied, e.g. in order to cope with the needs of a diagnostic procedure. Additionally, the kit-of-parts according to the invention can contain instructions for the simultaneous, sequential or separate use of the components in the kit. Said instructions can be in the form of printed material or in the form of an electronic support, capable of storing the instructions such that they can be read by a subject, such as electronic storage media (magnetic disks, tapes and similar), optical media (CD-ROM, DVD) and the like. Additionally or alternatively, the media can contain Internet addresses providing said instructions.

[0028] The BACs are hereinafter referred using the NCBI-recommended clone nomenclature. For instance, the term “CTD-2162L23” indicates a clone in the “CTD” BAC library. More precisely, it is a clone found in the microtiter dish “2162” at the intersection of row “L” and column “23”.

[0029] The term “CTD-2162L23” corresponds to a BAC which comprises a region of chromosome 11 having a length of 126394 by and starting at position 67821470 and ending at position 67947863 according to the sequence of chromosome 11 in the UCSC Human Genome Browser (GRCh37/hg19 Assembly of Feb. 2009). Its nucleotide sequence is shown in SEQ ID NO:1.

[0030] The term “RP11-314K20” corresponds to a BAC which comprises a region of chromosome 11 having a length of 192918 by and starting at position 67716432 and ending at position 67909349 according to the sequence of chromosome 11 in the UCSC Human Genome Browser (GRCh37/hg19 Assembly of Feb. 2009). Its nucleotide sequence is shown in SEQ ID NO:2.

[0031] The term “CTD-2655K5” corresponds to a BAC which comprises a region of chromosome 11 having a length of 191582 by and starting at position 67839236 and ending at position 68030817 according to the sequence of chromosome 11 in the UCSC Human Genome Browser (GRCh37/hg19 Assembly of February 2009). Its nucleotide sequence is shown in SEQ ID NO:3.

[0032] The term “CTC-783C1” corresponds to a BAC which comprises a region of chromosome 11 having a length of 154055 by and starting at position 67800991 and ending at position 67955045 according to the sequence of chromosome 11 in the UCSC

[0033] Human Genome Browser (GRCh37/hg19 Assembly of February 2009). Its nucleotide sequence is shown in SEQ ID NO:4.

[0034] The term “polynucleotide”, as used herein, shall mean any single or double stranded nucleotide polymer of genomic origin or some combination thereof, which by virtue of its origin the isolated polynucleotide (1) is not associated with all or a portion of a polynucleotide in which the isolated polynucleotide is found in nature, (2) is linked to a polynucleotide to which it is not linked in nature, or (3) does not occur in nature as part of a larger sequence.

[0035] The term “human genomic fragment”, as used in the present invention refers to a specific fragment comprising a gene or a fragment of a gene of human origin or a variant thereof. A person skilled in the art will understand that the present invention relates not only to the genomic fragments mentioned in the present invention, but also to variants thereof. A person skilled in the art will also understand that the variant of the human genomic fragment can be of any mammal, such as simians, mice, rats, pigs, dogs, rabbits, cats, cows, horses and goats.

[0036] The term “variant of the human genomic fragment” according to the present invention relates to any polynucleotide in which one or more nucleotides of the polynucleotides according to the invention are deleted, added or substituted. As is known in the state of the art, the identity between two nucleotide sequences is determined by comparing the sequence of a first and a second nucleic acid. Variants according to the present invention include nucleic acid sequences presenting at least 60%, 65%, 70%, 72%, 74%, 76%, 78%, 80%, 90% or 95% similarity or identity with the original nucleotide sequence. The degree of identity between two nucleic acids is determined by using computational algorithms and methods which are widely known by the persons skilled in the art. The identity between two nucleic acid sequences will preferably be determined by using the BLAST algorithm [BLAST Manual, Altschul, S., et al., NCBI NLM NIH Bethesda, Md. 20894, Altschul, S., et al., J. Mol. Biol. 215: 403-410 (1990)].

[0037] The variant of the human genomic fragments include fragments which preserve the capacity to hybridize under stringent conditions to the polynucleotides comprising the human genomic fragments present in the BACs as mentioned above.

[0038] “Stringent hybridisation” is used herein to refer to conditions under which nucleic acid hybrids are stable. As known to those of skill in the art, the stability of hybrids is reflected in the melting temperature (Tm) of the hybrids. In general, the stability of a hybrid is a function of ionic strength, temperature, G/C content, and the presence of chaotropic agents. The Tm values for polynucleotides can be calculated using known methods for predicting melting temperatures (see, e.g., Baldino et al, Methods Enzymology 168:761-777; Bolton et al, 1962, Proc. Natl. Acad. Sci. USA 48: 1390; Bresslauer et al, 1986, Proc. Natl. Acad. Sci USA 83:8893-8897; Freier et al, 1986, Proc. Natl. Acad. Sci USA 83:9373-9377; Kierzek et al, Biochemistry 25:7840-7846; Rychlik et al, 1990, Nucleic Acids Res 18:6409-6412 (erratum, 1991, Nucleic Acids Res 19:698; Sambmok et al, ad supra); Suggs et al, 1981, In Developmental Biology Using Purified Genes (Brown et al, eds.), pp. 683-693, Academic Press; and Wetmur, 1991, Crit Rev Biochem MoI Biol 26:227-259. All publications are incorporated herein by reference). In some embodiments, the polynucleotide encodes the polypeptide disclosed herein and hybridizes under defined conditions, such as moderately stringent or highly stringent conditions, to the complement of a sequence comprising the genomic fragment present in the BACs as defined above.

[0039] The term “moderately stringent conditions” as used herein refers to conditions that permit target-DNA to bind a complementary nucleic acid that has about 60 percent identity, preferably about 75 percent identity, about 85 percent identity to the target DNA, with greater than about 90 percent identity to target-polynucleotide. Exemplary moderately stringent conditions are conditions equivalent to hybridisation in 50% formamide, 5× Denhardt's solution, 5×SSPE, 0.2% SDS at 42° C., followed by washing in 0.2×SSPE, 0.2% SDS, at 42° C.

[0040] The term “highly stringent conditions”, as used herein refers generally to conditions that are about 10 degrees centigrade or less from the thermal melting temperature Tm as determined under the solution condition for a defined polynucleotide sequence. In some embodiments, a high stringency condition refers to conditions that permit hybridisation of only those nucleic acid sequences that form stable hybrids in 0.018M NaCl at 65° C. (i.e., if a hybrid is not stable in 0.018M NaCl at 65° C., it will not be stable under high stringency conditions, as contemplated herein). Exemplary high stringency conditions can be provided, for example, by hybridisation in conditions equivalent to 50% formamide, 5× Denhardt's solution, 5×SSPE, 0.2% SDS at 42° C., followed by washing in 0.1×SSPE, and 0.1% SDS at 65° C. Another high stringency condition is hybridizing in conditions equivalent to hybridizing in 5×SSC containing 0.1% (w:v) SDS at 65° C. degrees centigrade and washing in 0.1×SSC containing 0.1% SDS at 65° C.

[0041] Other high stringency hybridisation conditions, as well as moderately stringent conditions, are described in the references cited above.

[0042] In a preferred embodiment, the human genomic fragments are found within cloning vehicles in order to allow their propagation. The skilled person will understand that the cloning vehicles are those which can accommodate human genomic fragments having the size of the genomic fragments according to the invention. Thus, preferably, the cloning vehicle is an artificial chromosome. The cloning vehicle can comprise an artificial chromosome comprising a bacterial artificial chromosome (BAC), a bacteriophage P1-derived vector (PAC), a yeast artificial chromosome (YAC), or a mammalian artificial chromosome (MAC). In a preferred embodiment, the human genomic fragments are provided in BACs.

[0043] The term “bacterial artificial chromosome” (BAC), as used herein, refers to a DNA construct, based on a functional fertility plasmid (or F-plasmid), which has a low copy number because of the strict control of replication, used for transforming and cloning in bacteria, usually E. coli. The BAC's usual insert size is 150-350 kbp in which medium-sized segments of DNA (100,000 to 300,000 bases in length) that come from another species are cloned into bacteria. Once the foreign DNA has been cloned into the bacteria's chromosome, many copies of it can be made (amplified) and sequenced. In addition, BAC libraries of human genomic DNA have more complete and accurate representation of the human genome than libraries in cosmids or yeast artificial chromosomes. BACs are described in further detail in U.S. application Ser. Nos. 10/659,034 and 61/012,701, which are hereby incorporated by reference in their entireties.

[0044] The present invention comprises any combination of two or more of the polynucleotides (a) to (d) as defined above. Thus, in preferred embodiment, the composition according to the invention comprises the following combinations of polynucleotides: (a) and (b); (a) and (c), (a) and (d); (b) and (c); (b) and (d); (c) and (d); (a), (b) and (c); (a), (b) and (d); (a), (c) and (d); (b), (c) and (d) and (a), (b), (c) and (d). In a preferred embodiment, the composition comprises the polynucleotides (a), (b), (c) and (d). In a preferred embodiment, the BACs are the CTD-2162L23, RP11-314K20, CTD-2655K5 and CTC-783C1 BACs, already defined above. The BACs are commercially available, for example, the RP11 BAC library is available from the BAC Resources PAC (Children's Hospital Oakland Research Institute), from Empire Genomics, imaGenes or Invitrogen; and the CTD and CTC BAC libraries are available from Thermo Fisher Scientific Inc.

[0045] Method For Determining the Copy Number of the CHKA Gene

[0046] In another aspect, the invention relates to a method for determining the copy number of the CHKA gene, hereinafter referred to as the first method of the invention, which comprises:
[0047] (a) contacting a sample containing genetic material with the composition of the invention under conditions adequate for the hybridisation of the composition with the CHKA gene or genes present in the sample; and
[0048] (b) determining the copy number of the CHKA gene based on the hybridisation of the composition with the sample containing genetic material.

[0049] The CHKA gene, as used in the present invention, refers to the gene which codes for the enzyme Choline kinase alpha (CHKA), that catalyzes the chemical reaction between ATP and choline to make a phosphocholine (EC 2.7.1.32). The skilled person in the art will understand that it is possible to use the first method of the invention in CHKA from different species. Thus, the invention considers the determination of the copy number of the CHKA gene from human origin, as defined in the NCBI database, version Mar. 29, 2011 (positions 67820326 to 67888858 in the genomic region shown in the NCBI database under accession number NC_{—}000011.9), but also of CHKA from rat (Rattus norvegicus) (positions 206368963 to 206418526 in the genomic region shown in the NCBI database under accession number NC_{—}005100.2), from mouse (Mus musculus) (positions 3851773 to 3894367 in the genomic region shown in the NCBI database under accession number NC_{—}000085.5), from bull (Bos Taurus) (positions 47653321 to 47685935 in the genomic region shown in the NCBI database under accession number NC_{—}007330.4), from Danio rerio (positions 20903529 to 20926085 in the genomic region shown in the NCBI database under accession number NC_{—}007129.5), from Gallus gallus (positions 17301687 to17319617 in the NCBI database under accession number NC_{—}006092.2), from Canis lupus familiaris (positions 52771483 to 52807744 in the NCBI database under accession number NC_{—}006600.2), from common chimpanzee (Pan troglodytes) (positions 65735780 to 65807409 in the NCBI database under accession number NC_{—}006478.3), etc.

[0050] In a first step, the first method of the invention comprises contacting a sample containing genetic material with a composition according to the invention under conditions adequate for the hybridisation of the polynucleotides forming part of the composition with the CHKA gene or genes present in the sample.

[0051] The term “sample”, as used herein, relates to any sample which can be obtained from the subject and which contains genetic material. The present method can be applied to any kind of biological sample from a subject, such as a biopsy sample, tissue, cell or fluid (serum, saliva, semen, sputum, cerebral spinal fluid (CSF), tears, mucus, sweat, milk, brain extracts and the like). Methods of obtaining a biological sample from a subject are known in the art. Exemplary biological samples may be isolated from normal cells or tissues, or from neoplastic cells or tissues. Neoplasia is a biological condition in which one or more cells have undergone characteristic anaplasia with loss of differentiation, increased rate of growth, invasion of surrounding tissue, and which cells may be capable of metastasis. In particular examples, a biological sample includes a tumour sample, such as a sample containing neoplastic cells.

[0052] The samples described herein can be prepared using any method now known or hereafter developed in the art. Generally, tissue samples are prepared by fixing and embedding the tissue in a medium (such as paraffin). In other examples, samples include a cell suspension which is prepared as a monolayer on a solid support (such as a glass slide) for example by smearing or centrifuging cells onto the solid support. In further examples, fresh frozen (for example, unfixed) tissue sections may be used in the methods disclosed herein.

[0053] In some examples an embedding medium is used. An embedding medium is an inert material in which tissues and/or cells are embedded to help preserve them for future analysis. Embedding also enables tissue samples to be sliced into thin sections. Embedding media include paraffin, celloidin, OCT™ compound, agar, plastics, or acrylics.

[0054] Many embedding media are hydrophobic; therefore, the inert material may need to be removed prior to histological or cytological analysis, which utilizes primarily hydrophilic reagents. The term deparaffinization or dewaxing is broadly used herein to refer to the partial or complete removal of any type of embedding medium from a biological sample. For example, paraffin-embedded tissue sections are dewaxed by passage through organic solvents, such as toluene, xylene, limonene, or other suitable solvents. The process of fixing a sample can vary. Fixing a tissue sample preserves cells and tissue constituents in as close to a life-like state as possible and allows them to undergo preparative procedures without significant change. Fixation arrests the autolysis and bacterial decomposition processes that begin upon cell death, and stabilizes the cellular and tissue constituents so that they withstand the subsequent stages of tissue processing, such as for in situ hybridisation (ISH).

[0055] Tissues can be fixed by any suitable process, including perfusion or by submersion in a fixative. Fixatives can be classified as cross-linking agents (such as aldehydes, e.g., formaldehyde, paraformaldehyde, and glutaraldehyde, as well as non-aldehyde cross-linking agents), oxidizing agents (e.g., metallic ions and complexes, such as osmium tetroxide and chromic acid), protein-denaturing agents (e.g., acetic acid, methanol, and ethanol), fixatives of unknown mechanism (e.g., mercuric chloride, acetone, and picric acid), combination reagents (e.g., Carnoy's fixative, methacarn, Bouin's fluid, B5 fixative, Rossman's fluid, and Gendre's fluid), microwaves, and miscellaneous fixatives (e.g., excluded volume fixation and vapor fixation). Additives may also be included in the fixative, such as buffers, detergents, tannic acid, phenol, metal salts (such as zinc chloride, zinc sulfate, and lithium salts), and lanthanum.

[0056] The most commonly used fixative in preparing samples for immunohistochemistry (IHC) is formaldehyde, generally in the form of a formalin solution (4 percent formaldehyde in a buffer solution, referred to as 10 percent buffered formalin). In one example, the fixative is 10 percent neutral buffered formalin.

[0057] The expression “conditions adequate for the hybridisation” have been described in detail above in the context of the compositions of the invention. Although the conditions may vary depending on the nature of the material under study, these conditions can be determined by the skilled person using routine procedures. The conditions are preferably those allowing hybridisation under moderately stringent conditions or under high stringent conditions. The “conditions adequate for the hybridisation” will be adjusted by a skilled person in the art and will vary depending upon the nature of the hybridisation method and the composition and length of the hybridizing nucleic acid sequences of the composition of the invention. Generally, the temperature of hybridisation and the ionic strength (such as the sodium concentration) of the hybridisation buffer will determine the stringency of hybridisation. Calculations regarding hybridisation conditions for attaining particular degrees of stringency are discussed in Sambrook et al., (1989) Molecular Cloning, second edition, Cold Spring Harbor Laboratory, Plainview, N.Y. (chapters 9 and 11) and in Ausubel et al., Short Protocols in Molecular Biology: A Compendium of Methods from Current Protocols in Molecular Biology, 4th ed., Wiley and Sons, 1999.

[0058] The second step of the first method of the invention involves determining the copy number of the CHKA gene based on the hybridisation of the composition with the sample containing genetic material.

[0059] The term “copy number”, as used herein, refers to the number of copies of a nucleic acid molecule in a cell. The copy number includes the number of copies of one or more genes or portions thereof in genomic (chromosomal) DNA of a cell. In a normal cell (such as a non-tumour cell), the copy number of a gene (or any genomic DNA) is usually about two (one copy on each member of a chromosome pair). In some examples, the copy number of a gene or nucleic acid molecule includes an average copy number taken from a population of cells.

[0060] Methods of determining the copy number of a gene or chromosomal region are well known to those of skill in the art. Said methods include, without limitation, in situ hybridisation (such as fluorescent, chromogenic, or silver in situ hybridisation), comparative genomic hybridisation, or polymerase chain reaction (such as real-time quantitative PCR). In a particular embodiment, the copy number of the CHKA gene is determined by in situ hybridisation (ISH), such as fluorescence in situ hybridisation (FISH), chromogenic in situ hybridisation (CISH), or silver in situ hybridisation (SISH). In a preferred embodiment, the copy number of the CHKA gene is determined by FISH.

[0061] The term “fluorescent in situ hybridisation” or FISH, as used in the present invention, refers to a cytogenetic technique that is used to detect and localize the presence or absence of specific DNA sequences on chromosomes. FISH uses fluorescent probes that bind to only those parts of the chromosome with which they show a high degree of sequence similarity. As the probe for FISH, a DNA fragment, a PCR product, a cDNA, a PAC clone or a BAC clone (each of which has a sequence of interest) may be used. In a typical method using FISH, a DNA probe (a CHKA probe) is labeled with a fluorescent dye or a hapten, typically in the form of fluor-dUTP, digoxigenin-dUTP, biotin-dUTP or hapten-dUTP that is incorporated into the DNA using enzymatic reactions, such as nick translation or PCR. The sample containing the genetic material (chromosome samples) may be smears on slide glass prepared from cultured cells of an isolated cancer. Alternatively, chromosome samples may be slide samples sliced from formalin-fixed, paraffin-embedded cancer-containing tissue blocks. After hardening for prevention of falling off from the slide glass during hybridisation process, chromosome sample slides are denatured by formamide treatment. The labeled probe is then hybridized to the sample containing genetic material on slides under appropriate conditions, which will be determined by the skilled person in the art. After hybridisation, the labeled sample is visualized either directly (in the case of a fluor-labeled probe) or indirectly (using fluorescently labeled antibodies to detect a hapten-labeled probe).

[0062] In the case of CISH, the probe is labeled with digoxigenin, biotin, or fluorescein and hybridised to the sample containing genetic material (chromosome or nuclear preparations) under appropriate conditions. The probe is detected with an anti-digoxigenin, -biotin or -fluorescein antibody, which is either conjugated to an enzyme (such as horseradish peroxidase or alkaline phosphatase) that produces a coloured product at the site of the hybridized probe in the presence of an appropriate substrate (such as DAB, NBT/BCIP, etc.), or with a secondary antibody conjugated to the enzyme. SISH is similar to CISH, except that the enzyme (such as horseradish peroxidase) conjugated to the antibody (either anti-hapten antibody or a secondary antibody) catalyzes deposition of metal nanoparticles (such as silver or gold) at the site of the hybridized probe. For any ISH method, CHKA gene copy number may be determined by counting the number of fluorescent, coloured, or silver spots on the chromosome or nucleus.

[0063] Any label that can be attached to a nucleic acid molecule (such as CHKA nucleic acid) can be used to label the CHKA probes, thereby permitting detection of the nucleic acid molecule. Examples of labels include, but are not limited to, radioactive isotopes, enzyme substrates, co-factors, ligands, chemiluminescent agents, fluorophores, haptens, enzymes, and combinations thereof. Methods for labelling and guidance in the choice of labels appropriate for various purposes are discussed for example in Sambrook et al. (Molecular Cloning: A Laboratory Manual, Cold Spring Harbor, N.Y., 1989) and Ausubel et al. (In Current Protocols in Molecular Biology, John Wiley and Sons, New York, 1998).

[0064] In a particular embodiment, the contacting step is carried out using a composition comprising polynucleotides comprising the human genomic fragment present in the CTD-2162L23, RP11-314K20, CTD-2655K5 and CTC-783C1 BACs. The BACs have been defined above.

[0065] The preferred method of the first method of the invention includes the following steps:
[0066] (a) The BACs are transformed into a bacteria (as E.coli) and the bacteria culture is grown in an appropriate medium and the BACs DNA extracted;
[0067] (b) Labelling of the DNA extracted from the BACs using the “nick translation” technique, wherein the DNA is treated with DNase to produce single-stranded “nicks”. This is followed by replacement in nicked sites by DNA polymerase I, which elongates the 3′ hydroxyl terminus, removing nucleotides by 5′-3′ exonuclease activity, replacing them with dNTPs. Then a fluorophore is attached for fluorescent labelling, or an antigen for immunodetection (e.g. digoxigenin or biotin). When DNA polymerase I eventually detaches from the DNA, it leaves another nick in the phosphate backbone. The nick has “translated” some distance depending on the processivity of the polymerase. This nick could be sealed by DNA ligase, or its 3′ hydroxyl group could serve as the template for further DNA polymerase I activity. Proprietary enzyme mixes are available commercially to perform all steps in the procedure in a single incubation, for example the commercial kit of Vysis (Downers Grove, USA).
[0068] (c) Denaturation of the labeled DNA extracted from the BAC, preferably at 75° C.
[0069] (d) Cells with the sample containing the genetic material are fixed on slides and a denaturation step is performed with formamide and a temperature preferably of 42° C.
[0070] (e) Perform the contacting step or hybridisation between the sample containing the genetic material and the labeled DNA extracted from the BAC in the denaturated form, as explained previously.
[0071] (f) Addition of antibodies anti-digoxigenin or avidin linked with a fluorophore.
[0072] (g) Detection of the signal by microscopy and determination of the copy number of the CHKA gene.

[0073] Method For Predicting the Outcome of a Patient Suffering Cancer

[0074] Moreover, the authors of the present invention have observed that amplification of the CHKA gene is indicative of a poor outcome of patients diagnosed with cancer. For instance, the example of the present invention describes that patients comprising more than 4 copies of the CHKA gene show reduced survival and relapse-free survival than patients wherein the number of copies of the CHKA gene is reduced. Thus, in another aspect, the invention relates to an in vitro method, hereinafter second method of the invention, for predicting the outcome of a subject suffering from cancer comprising detecting whether the CHKA gene wherein is amplified in a sample from said subject, wherein amplification of the CHKA gene is indicative of an unfavourable outcome of the subject.

[0075] The term “predicting the outcome”, as used herein, refers to a medical term to describe the likely outcome of an illness or progression of the course of a disease or to the prognosis of a disease, such as cancer (for example, non-small cell lung cancer). The prediction or prognosis can include determining the likelihood of a subject to develop aggressive, recurrent disease, to develop one or more metastases, to survive a particular amount of time (e.g., determine the likelihood that a subject will survive 1, 2, 3, 4, or 5 years), to survive a particular amount of time without disease progression (e.g., determine the likelihood that a subject will survive 1, 2, 3, 4, or 5 years without progression), to respond to a particular therapy (e.g., chemotherapy), or combinations thereof.

[0076] As will be understood by those skilled in the art, the prognostic methods according to the present invention, although preferred to be, need not be correct for 100% of the subjects to be diagnosed or evaluated. The term, however, requires that a statistically significant portion of subjects can be identified as having increased probability of having a given outcome. Whether a subject is statistically significant can be determined without further ado by the person skilled in the art using various well known statistic evaluation tools, e.g., determination of confidence intervals, p-value determination, Student's t-test, Mann-Whitney test, etc. Details are found in Dowdy and Wearden, Statistics for Research, John Wiley & Sons, New York 1983. Preferred confidence intervals are at least 50%, at least 60%, at least 70%, at least 80%, at least 90% at least 95%. The p-values are, preferably, 0.05, 0.025, 0.01, 0.001 or lower.

[0077] Any parameter which is widely accepted for determining the progression of a patient can be used for predicting the outcome of a subject and include, without limitation:
[0078] disease-free progression which, as used herein, describes the proportion of subjects in complete remission who have had no recurrence of disease during the time period under study.
[0079] disease-free survival (DFS), as used herewith, is understood as the length of time after treatment for a disease during which a subject survives with no sign of the disease.
[0080] objective response which, as used in the present invention, describes the proportion of treated subjects in whom a complete or partial response is observed.
[0081] tumour control which, as used in the present invention, relates to the proportion of treated subjects in whom complete response, partial response, minor response or stable disease ≧6 months is observed.
[0082] progression free survival which, as used herein, is defined as the time from start of treatment to the first measurement of cancer growth.
[0083] Time to progression (TTP), as used herein, relates to the time after a disease is treated until the disease starts to get worse. The term “progression” has been previously defined.
[0084] six-month progression free survival or “PFS6” rate which, as used herein, relates to the percentage of subjects wherein free of progression in the first six months after the initiation of the therapy and
[0085] median survival which, as used herein, relates to the time at which half of the subjects enrolled in the study are still alive.

[0086] The term “subject”, as used herein, refers to all animals classified as mammals and includes, but is not restricted to, domestic and farm animals, primates and humans, e.g., human beings, non-human primates, cows, horses, pigs, sheep, goats, dogs, cats or rodents. Preferably, the subject is a male or female human of any age or race. In the context of the present invention, the subject is a subject suffering from cancer or previously diagnosed with cancer.

[0087] The terms “cancer” and “cancerous” refer to or describe the physiological condition in mammals that is typically characterized by unregulated cell growth/proliferation. Examples of cancer include, but are not limited to, carcinoma, lymphoma (e.g., Hodgkin's and non-Hodgkin's lymphoma), blastoma, sarcoma, and leukemia. More particular examples of such cancers include squamous cell cancer, small-cell lung cancer, non-small cell lung cancer, adenocarcinoma of the lung, squamous carcinoma of the lung, cancer of the peritoneum, hepatocellular cancer, gastrointestinal cancer, pancreatic cancer, glioma, cervical cancer, ovarian cancer, liver cancer, bladder cancer, hepatoma, breast cancer, colon cancer, rectal cancer, colorectal cancer, endometrial or uterine carcinoma, salivary gland carcinoma, kidney cancer, liver cancer, prostate cancer, vulval cancer, thyroid cancer, hepatic carcinoma, leukemia and other lymphoproliferative disorders, and various types of head and neck cancer. In a preferred embodiment, the cancer is selected from the group of breast cancer, colon cancer, lung cancer, bladder cancer and prostate cancer.

[0088] The term “lung cancer” is meant to refer to any cancer of the lung and includes non-small cell lung carcinomas and small cell lung carcinomas. In a preferred embodiment, the second method of the invention is applicable to a subject suffering from NSCLC. In a particular embodiment, the NSCLC is selected from squamous cell carcinoma of the lung, large cell carcinoma of the lung, and adenocarcinoma of the lung. Furthermore, the present method can also be applicable to a subject suffering from any stage of NSCLC (stages 0, IA, IB, IIa, IIb, IIIa, IIIb or IV). In a preferred embodiment, the stage of NSCLC is advanced NSCLC, preferably, stages IIIa, IIIb or IV.

[0089] The terms “gene amplification” and “gene duplication” (and variants such as “amplification of a gene” or “duplication of a gene”) are used interchangeably and refer to a process by which multiple copies of a gene or gene fragment are formed in a particular cell or cell line. The copies of the gene are not necessarily located in the same chromosome. The duplicated region (a stretch of amplified DNA) is often referred to as an “amplicon”. Usually, the amount of the messenger RNA (mRNA) produced, i.e., the level of gene expression, also increases in proportion to the number of copies made of the particular gene.

[0090] The term “sample”, as used herein, relates to any sample which can be obtained from the subject. The present method can be applied to any kind of biological sample from a subject, such as a biopsy sample, tissue, cell or fluid (serum, saliva, semen, sputum, cerebral spinal fluid (CSF), tears, mucus, sweat, milk, brain extracts and the like). In a particular embodiment, said sample is a tissue sample, preferably a tumour tissue sample, more preferably a lung tumour tissue sample from a subject suffering from NSCLC. Said sample can be obtained by conventional methods, e.g., biopsy, by using methods well known to those of ordinary skill in the related medical arts. Methods for obtaining the sample from the biopsy include gross apportioning of a mass, or microdissection or other art-known cell-separation methods. Tumour cells can additionally be obtained from fine needle aspiration cytology. In order to simplify conservation and handling of the samples, these can be formalin-fixed and paraffin-embedded or first frozen and then embedded in a cryosolidifiable medium, such as OCT-Compound, through immersion in a highly cryogenic medium that allows for rapid freeze.

[0091] In a particular embodiment, the detection of the amplification of the CHKA gene comprises determining the copy number of the CHKA gene. Methods of determining the copy number of the CHKA gene are well known to those of skill in the art. The methods include, without limitation, in situ hybridisation (such as fluorescent in situ hybridisation (FISH), chromogenic, or silver in situ hybridisation), comparative genomic hybridisation, or polymerase chain reaction (such as real-time quantitative PCR). See for example, Avison, M., Measuring Gene Expression, New York: Taylor and Francis Group, 2007, Allison, D. B., et al, ed. DNA Microarrays and Related Genomics Techniques: Design, Analysis, and Interpretation of Experiments (Biostatistics), Boca Raton: Chapman and Hill/CRC, 2006; Hayat M. A., ed., Handbook of Immunohistochemistry and in situ Hybridisation of Human Carcinomas, Burlington: Elsevier Academic Press, 2004.

[0092] In another example, CHKA gene copy number is determined by comparative genomic hybridisation (CGH). See, e.g., Kallioniemi et al, Science 258:818-821, 1992; U.S. Pat. Nos. 5,665,549 and 5,721,098. In one example, CGH includes the following steps. DNA from tumour tissue (such as a lung cancer sample) and from normal control tissue (reference, such as a non-tumour sample) is labeled with different detectable labels, such as two different fluorophores. After mixing tumour and reference DNA along with unlabeled human Cot-1 DNA (placental DNA that is enriched for repetitive DNA sequences such as the Alu and Kpn family) to suppress repetitive DNA sequences, the mix is hybridized to normal metaphase chromosomes. The fluorescence intensity ratio along the chromosomes is used to evaluate regions of DNA gain or loss in the tumour sample. In a further example, CHKA gene copy number is determined by array CGH (aCGH). See, e.g., Pinkel and Albertson, Nat. Genet. 37:S11-S17, 2005; Pinkel et al, Nat. Genet. 20:207-211, 1998; Pollack et al, Nat. Genet. 23:41-46, 1999. Similar to standard CGH, tumour and reference DNA are differentially labeled and mixed. However, for aCGH, the DNA mixture is hybridized to a slide containing hundreds or thousands of defined DNA probes (such as probes that are homologous to portions of the CHKA gene). The fluorescence intensity ratio at each probe in the array is used to evaluate regions of DNA gain or loss in the tumour sample, which can be mapped in finer detail than CGH, based on the particular probes which exhibit altered fluorescence intensity. In one example, the array is an Agilent Human Genome CGH 44B Oligo Microarray (Agilent Technologies, Santa Clara, Calif.). In another example, the CGH array is a Whole Genome Tiling, Custom, or Chromosome specific Tiling Array (for example, a Chromosome 15 Tiling Array) as provided by Roche NimbleGen, Inc. (Madison, Wis.).

[0093] In general, CGH (and aCGH) does not provide information as to the exact number of copies of a particular genomic DNA or chromosomal region. Instead, CGH provides information on the relative copy number of one sample (such as a tumour sample, for example a lung cancer sample) compared to another (such as a control sample, for example a non-tumour cell or tissue sample). Thus, CGH is most useful to determine whether CHKA gene copy number of a sample is increased or decreased as compared to a control sample (such as a non-tumour cell or tissue sample or a reference value).

[0094] Additional methods that may be used to determine copy number of the insulin-like growth factor 1 receptor (IGF1R) gene are known to those of skill in the art. Such methods include, but are not limited to Southern blotting, multiplex ligation-dependent probe amplification (MLPA; see, e.g., Schouten et al., Nucl. Acids Res. 30:e57, 2002), and high-density SNP genotyping arrays (see, e.g. WO 98/030883).

[0095] Also disclosed herein is a method of scoring (for example, enumerating) copy number of a gene in a sample from a subject (such as a subject with neoplastic disease), wherein the sample is stained by ISH (such as FISH, SISH, CISH, or a combination of two or more thereof) for the gene of interest and wherein individual copies of the gene are distinguishable in cells in the sample. Typically, the method includes identifying individual cells in a sample with the highest number of signals per nucleus for the gene (such as the strongest signal in the sample), counting the number of signals for the gene in the identified cells, and determining an average number of signals per cell, thereby scoring the gene copy number in the sample. In additional embodiments, the method further includes counting the number of signals for a reference (such as a chromosomal locus known not to be abnormal, for example, centromeric DNA) and determining an average ratio of the number of signals for the gene to the number of signals for the reference per cell.

[0096] The scoring method includes identifying individual cells in the sample (such as a tissue section or tumour core) having the highest number of signals (such as the highest number of spots per cell or the brightest intensity of staining) for the gene of interest in the cells in the sample. Thus, the disclosed method does not determine gene copy number in a random sampling of cells in the sample. Rather, the method includes specifically counting gene copy number in those cells that have the highest gene copy number in the sample. In some examples, identifying the individual cells having the highest number of signals for the gene includes examining a sample stained by ISH for the gene under low power microscopy (such as about 20× magnification). Cells with the strongest signal (for example, highest amplification signal under higher power) are identified for counting by eye or by an automated imaging system. In some examples, such as when the sample is a tissue section, the sample is examined (for example, visually scanned) to identify a region that has a concentration of tumour cells that has amplification of the gene. Gene copy number in the cells with highest amplification in the selected region is then counted. In other examples, such as when the sample is a tumour core (such as a tumour microarray), most of the sample is visible in the field of view under low power magnification and the individual cells (such as tumour cells) with the strongest signal (for example, highest amplification signal under high power) are separately identified for counting. In particular examples, the cells chosen for counting the gene copy number may be non-consecutive cells, such as cells that are not adjacent to or in contact with one another. In other examples, at least some of the cells chosen for counting the gene copy number may be consecutive cells, such as cells that are adjacent to or in contact with one another.

[0097] The disclosed methods include counting the number of ISH signals (such as fluorescent, coloured, or silver spots) for the gene in the identified cells. The methods may also include counting the number of ISH signals (such as fluorescent, coloured or silver spots) for a reference (such as a chromosome-specific probe) in the identified cells. In some examples, the number of spots per cells is distinguishable in the identified cells and the number of spots are counted (or enumerated) and recorded. In other examples, one or more of the identified cells may include a cluster, which is the presence of multiple overlapping signals in a nucleus that cannot be counted (or enumerated). In particular examples, the number of copies of the gene (or chromosome) may be estimated by the person (or computer, in the case of an automated method) scoring the slide. For example, one of skill in the art of pathology may estimate that a cluster contains a particular number of copies of a gene (such as 10, 20, or more copies) based on experience in enumerating gene copy number in a sample. In other examples, the presence of a cluster may be noted as a cluster, without estimating the number of copies present in the cluster.

[0098] The number of cells identified for counting is a sufficient number of cells that provides for detecting a change (such as an increase or decrease) in gene copy number. In some examples, the number of cells identified for counting is at least about 20, for example, at least 25, 30, 40, 50, 75, 100, 200, 500, 1000 cells, or more. In a particular example, about 50 cells are counted. In other examples, every cell in the sample or every cell in a microscope field of vision, or in a number of microscope fields (such as at least 2 microscope fields, at least 3, at least 4, at least 5, at least 6 microscope fields, and the like) which contains 3 or more copies of the gene of interest (such as 3, 4, 5, 6, 7, 8, 9, 10, 15, 20, or more) is counted. In some examples, the biological sample is a tumour sample, such as a tumour which potentially includes a gene amplification. Exemplary biological samples include neoplastic cells or tissues, which may be isolated from solid tumours, including lung cancer (e.g., non-small cell lung cancer, such as lung squamous cell carcinoma), breast carcinomas (e.g. lobular and duct carcinomas), adrenocortical cancer, ameloblastoma, ampullary cancer, bladder cancer, bone cancer, cervical cancer, cholangioma, colorectal cancer, endometrial cancer, esophageal cancer, gastric cancer, glioma, granular call tumour, head and neck cancer, hepatocellular cancer, hydatiform mole, lymphoma, melanoma, mesothelioma, myeloma, neuroblastoma, oral cancer, osteochondroma, osteosarcoma, ovarian cancer, pancreatic cancer, pilomatricoma, prostate cancer, renal cell cancer, salivary gland tumour, soft tissue tumours, Spitz nevus, squamous cell cancer, teratoid cancer, and thyroid cancer.

[0099] In a preferred embodiment, the determination of the copy number of the CHKA gene is carried out by FISH. The term “fluorescent in situ hybridisation” or FISH has already been defined for the first method of the invention and thus, will not be explained herein in further detail. In a particular embodiment, the FISH is carried out using at least two BACs selected from the group of the CTD-2162L23, RP11-314K20, CTD-2655K5 and CTC-783C1 BACs. The BACs have already been explained in the composition of the invention.

[0100] Once the level of amplification of the CHKA gene has been determined, the second method of the invention comprises determining whether the patient will have a favourable or an unfavourable outcome depending on the level of amplification of the CHKA gene. Thus, patients having amplification of the CHKA gene will have an unfavourable outcome whether patients having a normal copy number of the CHKA gene will most likely show a favourable outcome.

[0101] The term “unfavourable outcome of the subject” as used in the present invention, refers to a subject whose prognosis is not good and who is likely to develop aggressive, recurrent disease, to develop one or more metastases, to survive for a small amount of time, e.g. 1, 2, 3, 4, or 5 years, to survive a small amount of time without disease progression (e.g., an unfavourable outcome of a subject will be survival of only 1, 2, 3, 4, or 5 years without progression) or to respond negatively to a particular therapy (e.g., chemotherapy).

[0102] A good prognosis entails, e.g., survival of a patient for more than 1 year after initial diagnosis (such as more than 2 years or more than 5 years), or survival of a patient for more than 6 months longer (e.g., more than 1 year longer, more than 2 years longer, more than 5 years longer) than the average survival for similarly situated patients. A poor prognosis entails, e.g., survival of a patient for less than 5 years after initial diagnosis (such as less than 2 years or less than 1 year), or survival of a patient less than the average survival for similarly situated patients (such as, about 3 months less than average survival, about 6 months less than average survival, or about 1 year less than average survival). In other examples, a good prognosis further predicts that a neoplasm may be less aggressive (e.g., less rapidly growing, and/or less likely to metastasize). A good prognosis may entail progression-free survival (such as lack of recurrence of the primary tumour or lack of metastasis) of a patient for more than 1 year after initial diagnosis (such as more than 2 years or more than 5 years), or progression-free survival of a patient for more than 6 months longer (e.g., more than 1 year longer, more than 2 years longer, more than 5 years longer) than the average survival for similarly situated patients. A poor prognosis may predict that a neoplasm may be more aggressive (e.g., more rapidly growing and/or more likely to metastasize). A poor prognosis may entail, e.g., progression-free survival of a patient for less than 5 years after initial diagnosis (such as less than 2 years or less than 1 year), or progression-free survival of a patient less than the average survival for similarly situated patients (such as, about 3 months less than average survival, about 6 months less than average survival, or about 1 year less than average survival).

[0103] For example, a good prognosis includes a greater than 40 percent chance that the subject will survive to a specified time point (such as one, two, three, four or five years), and/or a greater than 40 percent chance that the tumour will not metastasize. In several examples, a good prognosis indicates that there is a greater than 50 percent, 60 percent, 70 percent, 80 percent, or 90 percent chance that the subject will survive and/or a greater than 50 percent, 60 percent, 70 percent, 80 percent or 90 percent chance that the tumour will not metastasize. Similarly, a poor prognosis includes a greater than 50 percent chance that the subject will not survive to a specified time point (such as one, two, three, four or five years), and/or a greater than 50 percent chance that the tumour will metastasize. In several examples, a poor prognosis indicates that there is a greater than 60 percent, 70 percent, 80 percent, or 90 percent chance that the subject will not survive and/or a greater than 60 percent, 70 percent, 80 percent or 90 percent chance that the tumour will metastasize

[0104] In a preferred embodiment, the parameters to be measured are disease-free survival and overall survival.

[0105] In some examples, an increased CHKA gene copy number includes CHKA gene copy number per nucleus (such as average CHKA gene copy per nucleus) in the sample of greater than about two copies of the gene per nucleus (such as greater than 2, 3, 4, 5, 10, or 20 copies). In other examples, an increased CHKA gene copy number includes a ratio of CHKA gene copy number to Chromosome 11 copy number (such as an average CHKA gene: Chromosome 11 ratio) in the sample of greater than about 2 (such as a ratio of greater than 2, 3, 4, 5, 10, or 20). In further examples, an increased CHKA copy number includes an increase in CHKA gene copy number relative to a control (such as an increase of about 1.5-fold, about 2-fold, about 3-fold, about 5-fold, about 10-fold, about 20-fold, or more).

[0106] In other examples, both the CHKA gene and Chromosome 11 DNA (such as

[0107] Chromosome 11 centromeric DNA) are detected in a sample from the subject, for example by ISH. Chromosome 11-specific probes are well known in the art and include commercially available probes, such as Zymed SPOT-Light® Chromosome 11 Centromeric Probe (Invitrogen) or the Chromosome 11 Control Probe (Empire Genomics). The CHKA gene and Chromosome 11 DNA may be detected on the same sample (for example, on a single slide or tissue section, such as a dual colour assay) or in different samples from the same subject (for example, CHKA gene is detected on one slide and Chromosome 11 DNA is detected on a matched slide from the same subject, such as a single colour assay). The CHKA gene and Chromosome 11 DNA are detected with two different detectable labels for dual colour assay (such as two different fluorophores, two different chromogens, or a chromogen and metal nanoparticles). The CHKA gene and Chromosome 11 DNA may be detected with the same label for single colour assay. The CHKA gene and Chromosome 11 DNA copy number may be determined by counting the number of fluorescent, coloured, or silver spots on the chromosome or nucleus. A ratio of CHKA gene copy number and Chromosome 11 DNA number is then determined.

[0108] Thus, in a particular embodiment, if the sample of the subject which has been amplified has more than 2 copies of the CHKA gene, it is indicative of an unfavourable outcome of the subject. In a particular embodiment, if the sample of the subject which has been amplified has more than 4 copies of the CHKA gene, it is indicative of an unfavourable outcome of the subject.

[0109] The second method of the invention may further comprise the determination of the copy numbers of other genes which are known to be amplified in cancer cells. Examples include, but are not limited to IGF1R (15q26.3; e.g., GENBANK™ Accession No. NC_{—}000015, nucleotides 97010284-97325282), EGFR (7p12; e.g., GENBANK™ Accession No. NC_{—}000007, nucleotides 55054219-55242525), HER2 (17q21.1; e.g., GENBANK™ Accession No. NC_{—}000017, nucleotides 35097919-35138441), C-MYC (8q24.21; e.g., GENBANK™ Accession No. NC_{—}000008, nucleotides 128817498-128822856), TOP2A (17q21-q22; e.g., GENBANK™ Accession No. NC_{—}000017, complement, nucleotides 35798321-35827695), MET (7q31; e.g., GENBANK™ Accession No. NC 000007, nucleotides 116099695-116225676), FGFR1 (8p1 1.2-p1 1.1; e.g., GENBANK™ Accession No. NC_{—}000008, complement, nucleotides 38387813-38445509), FGFR2 (10q26; e.g., GENBANK™ Accession No. NC_{—}000010, complement, nucleotides 123227845-123347962), MDM2 (12q14.3-q15; e.g., GENBANK™ Accession No. NC_{—}000012, nucleotides 67488247-67520481), KRAS (12p12.1; e.g. GENBANK™ Accession No. NC_{—}000012, complement, nucleotides 25249447-25295121), and TYMS (18p1 1.32; e.g., GENBANK™ Accession No. NC OOOO 18, nucleotides 647651-663492), wherein the amplification in the CHKA gene and in one or more of said genes is indicative of a worse prognosis.

[0110] The following example is provided as merely illustrative and is not to be construed as limiting the scope of the invention.

### EXAMPLE

### I. Materials and Methods

[0111] 1. Development of Cytogenetic Probes to Analyze Gene Amplification or Translocation

[0112] The probes were generated using BACs (Bacterial Artificial Chromosomes) which contained the CHKA gene. All information about these BACs is available in different public databases such as UCSC (www.genome.ucsc.edu) and Ensembl (www.ensembl.org). A total of 9 BACs were potentially useful for gene amplification, i.e. they contained the whole CHKA gene, and 6 BACs (3 pairs) were useful for translocation analysis, i.e. each pair flanked the CHKA gene. If there is a translocation, the signals of the pair of BACs will be separated in different chromosomes and if there is not translocation, the signals will be joined. Comparing the information about these BACs in the different public databases, 8 BACs were discarded because their location were mistaken (they were not in chromosome 11q13 where CHKA is located) or they hybridized to chromosomes other than 11q13. After this initial filtering step, 7 BACs were finally selected (5 for gene amplification and 2 for translocation analysis). The BACs selected were commercially available and were the following (the size and the sequence of the fragment is also indicated):

BACs for gene amplification
RP11-314K20 (193 kb) (SEQ ID NO: 2)
RP11-110E14 (171 kb) (SEQ ID NO: 5)
CTC-783C1 (154 kb) (SEQ ID NO: 4)
CTD-2162L23 (126 kb) (SEQ ID NO: 1)
CTD-2655K5 (191 kb) (SEQ ID NO: 3)
Translocation BACs
CTD-2061I7 (136 kb) (SEQ ID NO: 6)
CTD-3054O2 (94 kb) (SEQ ID NO: 7)

[0113] The BACs were grown and the DNA extracted. The fluorescence labelling was performed using the nick translation reaction.

[0114] 2. DNA Labelling by Nick Translation

[0115] After labelling the seven BACs preselected in the previous step using nick-translation, the BACs were evaluated by FISH in normal cells. The results confirmed that they hybridized only to chromosome 11q13.

[0116] 3. Fluorescence In Situ Hybridisation (FISH)

[0117] The technique allows the detection and localization of specific sequences of DNA or RNA using chromosomal preparations, cell extensions and preparations of tissue embedded in paraffin. In the last years its use has increased considerably as a complement of the conventional cytogenetics techniques. This method is based on using three types of probes: centromeric probes, chromosomal painting probes and single sequence probes (also known as specific locus probes). The probes used in the present example belong to this last type of probes which hybridize with the DNA of a specific genomic region corresponding to a gene or chromosomal region involved in different alterations (gene amplification, translocation between two genes or inversion that affects to one or several genes).

[0118] 4. Analysis of Normal and Tumour Cell Lines to Optimize the Conditions of Hybridisation for the Probes Containing CHKA

[0119] Metaphasic chromosomes from normal cell lines and metaphasic chromosomes from tumour cell lines with different expression levels of CHKA were used in the assays.

[0120] The tumour cell lines are listed herein:

| Bladder | Breast | Lung | Colon |
|---|---|---|---|
| UROTSA | HMEC (primary) | H460 | DLD1 |
| (immortalized) | | | |
| TCC-Sup | MCF7 | H510 | HT29 |
| SW-780 | MDA-MB-231 | H82 | |
| J-82 | SK-BR3 | | |

[0121] 5. Cytogenetics Analysis of Paraffin-Embedded Normal and Tumour Tissues

[0122] In hospitals, the main type of material used to diagnose and predict the outcome of the patient is paraffin-embedded tissue. That is the reason why a cytogenetics analysis was carried out in normal and tumour tissues embedded in paraffin from patients with NSCLC.

[0123] Optimization of FISH to analyze paraffin-embedded tissues was more difficult since the probes signals were very weak when they were used individually. Therefore, it was necessary to combine four out of the five probes designed to detect amplification to improve the hybridisation signal. Selected BACs were 2162123, 314k20, 2655k5 and 783c1, labelled all of them in red. Following this strategy, the hybridisation signals obtained were good enough to perform a retrospective study in lung cancer. A specific probe for the centromere of chromosome 11, labelled in green, was used to evaluate the number of this chromosome at same time that the copy number of CHKA was analyzed. This approach helped to discern between aneuploidy (more than two chromosomes 11) and gene amplification (copies not necessarily located in chromosome 11).

[0124] Tumours from a total of 50 patients with non small cells lung cancer (NSCLC) were collected and they were included in 3 different tissue microarrays, where control samples were also included. Control samples were normal lung tissue and normal liver tissue because the CHKA basal level is very high in this tissue. All the samples were analyzed as duplicate.

### II. Results

[0125] 1. Optimization of the Conditions of Hybridisation for the Probes Containing CHKA

[0126] First of all, it was shown that the probes generated hybridized to chromosome 11q13 where CHKA gene is located. After that, the hybridisation conditions were optimized to obtain the best results. To do that, different hybridisations using the seven probes over metaphasic chromosomes of different healthy individuals were performed. Once it was confirmed that the probes worked correctly, different tumour cell lines were analyzed as a first approach to dilucidate whether gene amplification or translocation could be mechanisms of CHKA over-expression.

[0127] When it was possible, the results obtained by FISH in tumour cell lines were compared with normal cell lines from the same tissue. FISH analysis showed a mean of 3-4 extra signals in tumour cell lines comparing to the 2 normal signals in primary cells (Table 1). These extra signals correlated to high level of CHKA protein, in fact the lung tumour cell line called H460 and the colon tumour cell line known as DLD1, both of them with low protein expression, presented a normal hybridisation pattern. It means they had only 2 gene copies. In general the correlation between gene copy number and protein expression of CHKA were good. At the same time, using the probes to detect gene translocation, this mechanism was excluded as explanation of CHKA over-expression.

TABLE 1
Results obtained by FISH using the probes to analyze
gene amplification or gene translocation.

| | | | |
|---|---|---|---|
| | CHKA | | |
| Cell lines | levels | Gene amplification | Translocation |

Bladder

| | | | |
|---|---|---|---|
| UROTSA | | 2 signals in chr 11q13 | No |
| (primary) | | | |
| TCC-Sup | Chok ↑ | 4 signals in chr 11q13 | No |
| SW-780 | Chok ↑↑ | 4 signals in chr 11q13 | No |
| | | (1chr was 11p-) | |
| J-82 | Chok ↑↑ | 4 signals in chr 11q13 | No |

Breast

| | | | |
|---|---|---|---|
| HMEC (primary) | | 2 signals in chr 11q13 | No |
| MCF7 | Chok ↑ | 4 signals | No |
| | | (2 chr 11, 1 chr19 & | |
| | | 1 marker) | |
| MDA-MB-231 | Chok ↑↑ | 3 signals in chr 11q13 | No |
| SK-BR3 | Chok ↑↑ | 4 signals in chr 11q13 | No |

Lung

| | | | |
|---|---|---|---|
| H460 | Chok ↑ | 2 signals in chr 11q13 | No |
| H510 | Chok ↑↑ | 3 signals in chr 11q13 | No |
| H82 | Chok ↑↑ | 2 signals in chr 11q13 | No |

Colon

| | | | |
|---|---|---|---|
| DLD1 | Chok ↑ | 2 signals in chr 11q13 | No |
| HT29 | Chok ↑↑ | 4 signals in chr 11q13 | No |

[0128] 2. Cytogenetics Analysis of Paraffin-Embedded Normal and Tumour Tissues

[0129] Finally, 48 lung tumour samples were analyzed by FISH using the assayed probes and the hybridisation conditions optimized. The conclusion was that 69% of them showed more than 2 copies of chromosome 11q13 (33 over 48). Near 90% of these (29 over 33) had between 3 and 6 gene copies and all of them presented more than 2 centromeric signals, it means more than 2 chromosomes 11.

[0130] 3. Survival Analysis of Patients NSCLC With Different Gene Copy Number by FISH

[0131] 3.1. Statistical Analyses

[0132] The Kaplan-Meier method was used to estimate overall and relapse-free survival. Only death from recurrence of lung cancer was considered in the study. The effect of the different factors on tumour-related recurrence and survival was assessed by the log-rank test for univariate analysis. To assess the effect of CHKA expression on survival, with adjustment for potential confounding factors, proportional hazard Cox regression modelling was used. Hazard ratios (HR) and 95% confidence intervals (95% CI) were calculated from the Cox regression model. All reported p values were two-sided. Statistical significance was defined as p<0.05. Statistical analyses were done using the SPSS software (version 17.0). In Table 2 it is disclosed the statistics of the patients included in the study.

TABLE 2
Characteristics of patients included in the study

| | n (%) | |
|---|---|---|
| Age | 43-82 years | |
| | (median 63.5) | |
| Sex | | |
| Men | 42 | (87.5%) |
| Women | 6 | (12.5%) |
| Histology | | |
| Squamous cell carcinoma | 32 | (66.7%) |
| Adenocarcinoma | 10 | (20.8%) |
| Other | 6 | (12.5%) |
| Stage | | |
| I_{A} | 3 | (6.3%) |
| I_{B} | 19 | (39.6%) |
| II_{A} | 2 | (4.2%) |
| II_{B} | 5 | (10.4%) |
| III_{A} | 8 | (16.7%) |
| III_{B}-IV | 7 | (14.6%) |
| Total | 48 | |
| Relapse | | |
| No | 31 | (64.6%) |
| Yes | 14 | (29.2%) |
| Unknown | 3 | (6.3%) |

[0133] 3.2. Prognostic Value of CHKA Copy Number in NSCLC

[0134] To study whether CHKA copy number was associated with clinical outcome of patients with NSCLC, 48 surgical specimens of NSCLC were analyzed by FISH. It was not found relation between CHKA copy number and the available clinical-pathologic parameters of the patients (stage, histological degree, age or sex). To analyse whether increased copy number of CHKA observed in a group of the tumours was associated with the clinical outcome of the patients, the patients were divided into two groups (the first one with tumour samples comprising less or equal to 4 gene copies and the second one with more than 4 gene copies). Under these conditions, 14 out of the 48 (29%) tumour samples analysed for CHKA copy number corresponded to the second group. Patients with increased gene copy number showed worse survival from lung cancer and relapse-free survival than those with lower gene copies (FIG. 1).

[0135] An association between less than 4 CHKA copies and improved lung-cancer specific survival was noted (p=0.067). The mean survival of patients with less than 4 gene copies was 46.9 months (39.65-54.1) whereas the mean survival of those with more than 4 gene copies decreased to 22.3 months (16.29-28.36).

[0136] Taken together, these results suggest that CHKA copy number is closely associated with relapse-free and overall survival among patients with NSCLC. Thus, the analysis of CHKA copy number by FISH could be a new prognostic factor that could be used to help identify patients with cancer with favourable prognosis who could receive less aggressive treatment options or avoid adjuvant systemic treatment, specifically patients with NSCLC.

The application's sequence listing, which the Patent Office published only in electronic form, follows.

SEQUENCE LISTING (7 sequences)

SEQ ID NO: 1 - DNA, 126394 bp, Homo sapiens
cctcttctggtggaaataggcatcaaaccttgcttgggcgtagtcctaggagacagcaaagagaaggcctcagcaaggaatcctgctggcctgaaccctgcccatgtgtcccccaatccccaccccaggcaagagctgagggcacggacccatgagaccaaaagcacaggactggcctgtgcagcagggctgctcgggggcctcgctgctctacaggtgcaggctcctcaagctcccagcccaccccacacaccttcattctcaggaggcctggtttataggcatgggccagcccagccctgcctctcaggatgaacgtctcatccacatgcttagcactgctaccattcatcaccttgctaaccctgggtgctgtgggcactgactgaccgacataacacaccttttagagcaaaagacccctgggacacaggcgagtctagaacagaaggggagaagaggatgcccatcgcctatttcccgggatctcctgcagcatgacttttaagaaggacactgagaggcaagggagaaaacccggcttggtgttctgtttctgccactatttttctgggattgtgttgtgtgaggacaacacaatctcaaagacccactcctaatctaaaagtctgcaattctagaagccaggaagattacaattaacttttttgaaaaattaactgagctgtaatttctactctacaagcatgagcccattttaagtgtccagttgagggccttcacagatgcatccagccagttctccaccaccgcagtcaggagacctgtgtttccagcatccctacaagctcccatgggcctcttgcagttggccacaggcagccaccgactcaatatctgtcactatggactggacttttctttcctagagtagcacataaatgccactatacaatatgcagcctcgtgtctggcttctcactcagcgtgctgtctctgagtggcctgtgctgtcatgcactggtgccaccttccttttgcactgccgagtgttctcagtacacggatctggcactgtcgtatccacacacctgctgactggcatttaggctgcttccagtttgggacgattataaatgaaggtgcagaccgggcgaggtggctcacacctgtaatcccaacactttggaaggccaaggcagacggatcacttgaggtcaggagtttgagaccagactggtcaacacggcgaaaccccctctactaaaaataaaaaattagctgggtgcggtggcgggcgcctgtaatcccagctactcaagaggctgaggcaggagaattgcttgaacccgggaggcggaggttgcagtgagccaagatcgggccactgtactcctcctgcctgggcaacagagtgagactctgtctcaaaaacagacaaacaaatgaagctgctatgagtgtttgagtgcaagtcttggtgtggaatttgttttcatttgttctggaaaaattccccaggagggctgctgggtggtctaacccatcttcacactggctgtcgcgactgcattcccagcagcagcgcatgcgcattcccattgctccatgtgctcgccatttgggaccgtcagttctttcaagttttagccatcactgtgggtgtgtagggtatcgcaatgaggctttgattcacatttctttaatgactaattatacaaaacacatgaaaagattcttactggccatgtgtttctcttaagtgtccaaatcttccatccatttataaagcaggctgaggccgggcgcggtggctcatgcctgtaatcctagcactttgggaggccaaggcgggtggatcacctgaggtcaggagttcgagaccagcctgaccaacacaaagaaaccccgtctctacttaaaaaaaaaaaaaaattagccaggcatggtggtgggctcctgtaatcccagctacttgggaggctgaggcaggagagtcgtttgaacccagaaggcagaggttgtggtgagccgagatcgcaccattgaactccagcctgcgcaacaagagcgaaactccatctcaaaataataataatgaagcaggctgtttggtttctggctgagttatgagttctttatatatcctaaatatgagtcctttattaaatatacatttgtagtatttcctcccagtctgtggcttgccttttcattttctccatgatatcgttcagagttactcattttgataaagtccaactgtgatgacatatatgtgtgtttttgtccagggtccctggctcataactcccatagcccttactacagtaaacagaatctctctctctgaccttctgccgtcctttcacctgcccaaagctagactctaatctgactgtgggtcataagactcttattccagagggggtcctgcaccataccctgggataaggaatgctgtacagagaagcccgaagaacctggtcaggtcttgctaggtttagatcacaccttttttgtccaatcacatttcaacacggttgtccacatttcaatcatgcctatccaatgacatctccataaaatgcccaagaggacagggtttggggagtttctagagaactgaatgtggaggctgacaggaaggtgaacaagaatgagttccccaacccacccacagggacagaagctcctgtgctgggaatcctttcagacctcaccccacctatttatctcttcacccttaaaataccctttgttagctaggcatggtggcggaatgtctgtagtcccagctacttggaaggttgagacaagaggatcgcttgagcccagaagttggagaccagcctgggcaacacagtgagaccctgtcttaaaaaaaaaaaagtaatacactggtaaacttacgtgtttccctgagttctgtgagctgctctagcaaattaattgaacccgaggggaacgtgggaactccaatatatggctagttggtcagaaattccagaggcctggacttgcaactggtgttggaagtggggggcagtcttaaggtctcaaccctcaacctgtggggtctgactctgtccccacgtagacagtgtcgtaatggaattggagggcacccatctggtgtccactccagaactgattacttgtttgttggcggggagaaccacccctgacgtggtcactttagtcttctgtggtgatgattgttgctgatgaaaggaatgggaaaaagcactttggtttttatgtgtttcctgctcacagcaacttactctattttttcctcttttatggctagtgctttatgtaacccaagaaatctgtgcttaggtcagtaagcttttctttttttcttttttgagacggagtctcattctgtcgcccaggccagagtgcagtggcatgatctcggctcaatgcaagctccacctcccgagttcacaccattctcctgcctcagcctctccagtagctgggactacaggcacctgccaccaggcccggctaattttttgtatttttagtagagacaaggtttcaccgtgttagccaggatggtctcaatctcctgacctcgtgatccaccagcctcggcctcccaaagtgctgggattacaggcgtgagccaccgcgaccagtctaggtcactaagcttttctcttgtgttttctcatagaaacttaatagttttagccttcacatttaggtctattatctgtttcaagttgactgttgtttatggcacagaatcaggttcagttttttctccacatgactcttcaaatgttcttgcatcattttttgaaaatacaatcctttccctcttaaattaccttggcctttctgttgagtaccaggtgattatatacacatggatcaatttctggacactgtattctgttccatctgatttgttttttgttttgttttgtttttgagatggggtcttgctctgttgcccaggctggagtgcagtggtgtgatcacagctcccctgacttcccaggctaaagtgatcttcccagctcagcctcccgcgcagctgggactacaggcatgtgctacagacacccagctaattgtttcgtattttttgtagagatgagtcttgctatgctgcccaggctggtttccaactcctgggctctagcgattctcctgcctcagcctcccaaagtgctggatgactggcttgagccaccacacctggatgatttacattacttatgccaccaccacactgccttgacttctgtgcttcagagaagtcttataaccaggtagtagaagtcttctttgttcttttacaaaattattttggttattccagactctttgcattttcatataaatttcaggatcagcatgtcaatttctacacagaagcctgtgggggttttgattaggcctgtggggaatgtacaggtcagtgtggggagaatgagcatctttaccttaaggcttccatccatcaaggtggtatcttctccatttatttcacttctttattttttacactctttcatagtttccaatgtacatatcttacactattaaacatttttccatgtacagttgtttctaccatgtagaaatccaactgatttttgtatactgaccttgtatcttgtgactttgataaactcattcattaggttaagcaacttttctgttgattcctttattattttaaaagcacacaatcatgtcacctaaagaataaaggcagtgtttcttcttccttcccagtgcacctatatttcctttctttgtcttgcctcactgcaccagctaggagcttcagtacaacacagaagacatgcagtgagaacaggcgtccttgcatgttctgtacttggggtgggggtcaaaggggacattttccctgttaccactagtgataatgttggctgtgggttttcctttttttttattgagacagagttttgctcttgttgcccaggctggagtgcagtggcgtgatctcggctcactgcaacctccacctcctgggttcaagcgattctcctgcctcagtttcctgagtagctgggattacaggcatgtgccaccacccctggctaattctgtattttagtagagacggggtttctccgtgttagtcaggctggtctcgaactcccgacctcaggtgatccacctgccctggcctcccaaagtgttgggattacaggcatgagccaccgcgcctggctggctgagggtttttcatacatgcctttatctggctgaggaagatcccctctagtcctagtttgctgagatttttttttatcacattggatcttgtcaaatgctttttcctgtggtccctgagataatcatacggtttttcaccttcattctgttaatatgaagaattatatgaactgattttttcaaatataaaccagccttgcattccagggataaatgccacttgaccataatatattatccttttacatatgttagtggatttaatttttgccaatgttttgatagggattttgtgtaatgtttcttcttatggaatataaacatttaagctacaaagccgtaagtttctagatactgctttatgtatatcccacaaatactgacatgctatgttttcattataattcagtttaaaatattttctcattttctttttaatttctttgacccagggtttatttagaagtgtactgtttaatttccaaataattgagaattttctagctatcttttgttgttgatttccacttaaatttcactgagaacatatccagtattatttcaatccctttgaatttatcaagacctgtctgatgggccagcatatggtctatcttgaggaatattccatattcatttgaaaagaatgtgcaccctgcagttgctggggggtttaatgaacatgcatgaggccaggctggcagggagagttgtaaggccctatccctccttctgcgtgtgttcctcctttgttctaaccacagaagaggagtggtgagatctcccatgttttttgttttgttttgtttttgtttctgagatagagtttcactcttttttttttgagacccagagtctcgctctgtcgcccaggctggagtgcagtggcgtgatctcggctcactgcaagctccgcctcctgggttcatgccattctcctgcctcagcctcccgagttagctgggactacaggcacccaccaacaggcccagctaatttttttttttgtatttttagtagagacggggtttcaccgtgtttgccaggatggtctcgatctcctgacctcgtgatccgcccgcctcggcctcccaaagttctgggattacaggcatgggccaccgcacccggccagagtttcattcttattgtccaggctggagtgcaatggcgccatctcggctcactgcaaactctgcctcccaggttcaagcgattctcctgcctcagcctccctaagtacctgggattacaggcatgtgccaccatgcccagctaatttttgtatttttagtagagatagagtttcaccatattggttaggctggtctcaaactcctgacctcaagtgatccaaccacctcggcctcccaaagtgctgggattacaggcgtgagccactgcaaccggccgagatcaccaactttaatcgtgaatctgccattttcttctttcacttttgtcagttttaatatcatgtcttttgaagcaagacaagggtttttaatgtcctctggatgtactgatgcctttattatcacaaaatgcccttctttatctctagtaatattccttgttacgaagtgtgctttgtcgtacagtatcatttgaccatgactcaaatctgctttaaaaatccaatgtccccttcttttacctaatatcatccttgcattaccaaaccttctgcctagaagtagaaatcattgtagtataagactgaggaggtcaaaatgaactagtcccatccctgtcccaaaggaaggcagctcaccagactgtggacatttgtgttatcccccaccccaagacaactcaccaacattcattcactatggaacaacagaaaggtttgtctgaaggttaaaaatactttctatttctatgtcagtgacagtttttttttttttttttttttttttttttgagacagaatcttgttctgtcacccaggctggagtgcagtggcatgatttcagctcactgcaacctccacctcctgggttcaagcggttctcctgcctcagcctcttgagtagctgggattacaggcgcccgccaccatgcatgctaattttggtatttttagtagagatggggtttccccacgttggccaggatggtctcgaactcctgacctcaggtgatctgcccacctcagcctcccgaagtgctgggattacaggcgtgagccaccgtacccggctgacaattcttaaggttaaaattaaatgacagcctagcttggttacaaacatgcctatgaaaaacaggaggtctaattcaataattaccagcttccaacccaaagtcgggcactacaggctggagaatgaagtggtaaccgataaataaaaccttccacagcacaggcaggagccacccactcttcttcacttactgtcccgtgtcagaagggactgaggtcagagctggacttcgagggtgcagatgcctacattccccatcaggattgcaggcacttctctgaagcaggggaggcaaggtcagctggcctggaagtgagggcaacctccaaaggcaaccacagcatcagtgacagcggcttctcccccggcttcctgggctgagccacactgtcctgatgccaccaggtcaccacattcgggtacttggggagacagagaaccctctgtaaggaacagtcatttgctgccaacattcacaaatactatagcatttttacctgggagtaggaagaaaaaaaaaaacaaaaacgctgctaaaacataccatgtacccaaattcaatagatgaaatcttggcttgtacaatggaccacagtccccagaggaaatgagatgcaagggcaaacctggaatgataaaagcaagaaacatataagagacatacagtatcagttacaggactgatgaaatgatttcatgccagatggacattttaacttgtgtggatgcaaacctagttagtgttggcaaatcatgggtctatattccacgggactaactaagaacaatgggaataccactcccacacccttccctcatctgctagtgacaggtgcactggtgagtgtgaacacacacagctggcctggccatggcacacgtaaatgccacttggccataatatattcacaaggtgaatatattcacattcacagggtgcaggtgaaggcctgggtggccatgctggcagaaaagaaagcaagcttgctacaagggagggtgcacaccatagcaaccaagaggcagccctttgctggaggcgggatgaagctctcactccttgagcaagagaattctcaaatcccatccttgtcccatcccctcctgtcacacagaagtgaaaagagcagatcagagagcgtgagccacgtcaccatctctaagctgtaccaagcccccaagtcactgtgaatccaagttcctcctcaaacaataccctgagggctcatccacatgaagataaagctcaaatttaggagtgcctgctctagtatcctccaaccctactctctgttcatcctgtggtccccggcccacaagagtcccgtgtgctaccctttctgtctgggttctcctccatctgtttttttctatttccaccagttcaagaaacagaaagagatgatgtatgctgcggtgaagcccagcaggtaggcaggtgtgacatcacacttagtgttgggggtgagcactctggaggccacgaggagatgactgtgctaagtgcgtggaaagatgaggggccacagtgacttaaacagccattctaccaaaaaatgtcacaggagaccccaaataataggaacaacccacaggcctcttgactaaagagatggacaaatagtggtctagacctttgcacaatctggaagtttcagggccctgctttgaaaactgttgagaaaacagttaaaagcaagacttaaaaccgataaacataagtttaatcattttctaggagaaacttaagagttaaaacacagcatatggtggccgccactccagaagcatcagtgacaagtttgcagggacagatgcagtagcccacatctgtaatcctagcactttggggggccaaggcaggagaaccacttgagcccaggagttcatgaccagcctgggcaacagagcaagacctcgtgtctacaaaaaaatacaaaaattagccaggcatggtggtacgtgcctgtagtcccagttacttgggaggctgaggcaagaggcttgctaagagttagaggctgcagtgagccatgatcgcatagctgcactccagcttgggtgacagatcaagactccatctcaaaaaaaaaaaaaattctataggctctgggtggcagcagccctgtatggctgggttgttgtgtctggatgacagttcagaatgccacaaagtgtcctgacccttcttggacatgggaactcttcttgtgatatggtttggctctgtctccccacccaaatctcatctttaattgtaatccccatgtgtggagggagggacctggcaggaggtgattagatcatgggggtagtttcccccatgctgtcctcacaatagtgagggagttctcacaagatctgatggttttacaagtatttggtagtcctaccttcttctctatctctctgcccctctctctcctggcgccatgtaagatgtgccttgcttcccctttgccttctgctatgattgttaagtttcctgaggcctccctggccatgcagaactgtgagtcaattaaaactcctttctttataaattacccagtctcaggtaatatctttgtagccatgtgagaacagactaatatactttgcctgctgtatgctcagatctgaaagctctgcatagtctcggccacaatggagaagtagcagattctatttttgacaaagtgcaagtcctaaagatgtacgattaaaaagaagctcctaggccaggcgcagtggctcacatctgtaatcccagcatgggaaggccgagctgggtggatcactggaggtcaggagttcaagactagcctggccaacatggcaaaaacccatctctactaaaaaatacaaaaattagctggacatggtggcaggcacctgtaatcccagctacttgggaagctgagacaggagaattgcttgaacccgggaggcggaggttgcagtgagccgagattgcgccactgcactccagcctgggtgacagagcaagactctgtctcaaaaaaaaaaaaagaagaagaagctctaaaatactcctaattgcaagtcagcatctcccaaatatagtctataaagaggaaagctatctttacaaatcaaaaaaggaaaaatgttacctattaacttcaagcaacatttcttcttttataatggatttttcttcagtactgaggttttcaaagtcattttggaatgcaggcaagtaactggaaataaaatggagcttaaaaaaaagtaattgtgttaggatcaatgatggttaaaatagacaatgtcaatagctgtcactaagcatatgcatctactgtgacacactgggagacacacactcaacatgatgttcagcatctccgacatcctggggctggcaccagtgagccaacctttgctaggttttcagccgctctctctccccaggatttctagtggagatacagtgtctaggctcttcagcatactttttccatttagagtagcacttaaaacataaactggagaccactattttggaggcaggcttggtgcaccctcccaatcctactcagcttcagcaccgctaccaaggtttcagtgctgggctgaggaatgggagagaaagatctcaggaggaaattcccatgagaactgattctccacacaatcaccagcctcctcccatcattcaggacaggaaagggaactgttaacaccaaagatatttcctcccactactaaaccctggtgcccgaaagattacttctctctccatagtgtgaaatgaatagaaaaaggtcagtgatcaccaaaaagatggccagaaagcagaatcaaggctgggcttttcaaaaaaatactacaaggaactacaaaggatgacaaagctcttctctgaatacaagtatctctggcacagagatttttaataagctggactaaaaggtcaagtttgtgtctacatttaacaggaacaaaataacattttttaacataaaccaaattttaaaaggttatctttaaaaatgaagatgtaggccaggcatggtggctcacaactgtaatcccagcagtttgggaggctgaggcaggaggatcacttgagcccaggagtttgagaccagcctgggcaacttggtgaaatcccatctctacaaaaaatacaaacaattagctgggcgtggtggcatgcgtctgtggtcccagctacttggggggctgaggcgagaggatcacctgagcacagaaggtcaagggtacagtgagccatgatcgcactactgcactccagcctgggaaacagagtgagaccctgcctcaaaaaataaaaaagaagatgtaattctaactgcatgaaattgacatgtaattttcctatcaagtatacaaaaactcatctcctacctgttgtttcttggtgggatacttccggatgtttgctctgaaaaaagggtatttttcatagctataatcatacatccactcacagaagtgatttccaatgtcgaatcccctgaaataagacataagacagtgcacacaatgaggcaaaccgtatgcctggaggctccctgactgcagaagaaagaaaggctgagttccgagcacgccactcctgttgccatctggacttgctgagggagcaggactgtagctgctttaatgacagagagagacaacaggtggttgatcagcatcacagctgactaaagctatacaggtgcacctgaaccactactccagaacattgtgtctcctagaccaggatttatgagaagaaaatgacctctgaagccaaaagaaaatgccaaagtctggactgaatggcatggctgtccccaactagcgctgtctgctaggaacaaagaaggctgtgctgcttcaccacaaccatcaccggccactggacgagaagccactgattccaggtgaagcagcttgcaactcagagcggcattttgacttattttctctaataactgttaattaagcatatcgtaatgataaatcaatattgagatggaaacactggactgtaacacagtacctgtaattgtaactgctgtattcgaaatcaatgagcatcagtttctgtttttcagaattctctcggccttccagcaacaagatattacctgcaaaaggtttggataacatggtttatgttttacaatagaaggctcaagtccttgaacagcagagccgagagaatggatttgatcccttagggaatcctaactgaatgtggcttttggtctgtggacatcaccagggcctagacagagcgtagaagtgctcacgggaggcataaccctatgcagggtggctcctgacccacctggccatgagaacccctgctcacagccctagtcctcgccagacccccaggatcactgtggaacaaagcctggcctcttgctctgctgtcaggacagtacttcccaaatgttctgcatggtggcatgcaggagctcgtgctagccaaacaccaccctcagcagccctgggacttggtttgctgtctgcaggccagctggctgcagcactccagctgggaagctgtgggagtgccctcctggtaagaaaggcaagggagagctcagctgccacaggggatcccctgctttgttcttgcctgcttttccttcccaaggagaccacaggcagcattcctacaagactatttgctttagtattggattctgggtcaggagttggtcagccatcagcctggctctgcaggcctgcgttcctgagatccccacactcgacatgatgttcagcatctccgacatcctgctgctggcaccagtgagccaaccttcgctaggttttcagcagctctctctccttaggatttctagtggaggtatagtgtctaggctcttcagcatactttttccatttagagtagcaattacaatgtaaactggagaccagaaaacgtgtattggctcacacttgtaatcacagcactttgggaggtggaggtgggaggatcacttaagtccaggagtttaagaccagcctgggcaacacagagaaactccatctccacaaataattagccaggtgtagtggtgtgcgcctgtgatcccaactactcaggaggctaaggcaggaggatcacttaagcccaacaggctaaggttacgtggagcctagactgcactactgcacaccagcctgggtgacacagtaacagtctcaaaaaaaaggcaaattggaggcagacgcccaaagtagcacaacaaaattaatgtacaactgttacctcttcgatccttcctacactttgccatcatcaacacagccgatctcctccagtcccctctctctagtgatgtctgtgccatttatcaccccctcaccaccagaagggcaagggtaatacacaaagctgtagctgtaatgtctacaccctccttgagttagccagcgatgagcagctaattagtaaaaggtaatttggctcaaatgaatggcttatggatgacgagtcttcatgagaaactgttctcaggattaaaagcaaactgctgagcctggcaaacaagggctcaaggtgggacctgaactactgtgactaggggaggcaaggtcaaggcagagagaggccatgtcagcagcaccagtgggagctgcatagtggggggcctctgatgagactgttcaatgtgcaattgcatgggatgaagttttgttacagtaaggaacatatcactgtcatgttttcaaagcagagaagcccgaaataattaatagcacagtgcactgatactaggagaggaggtgttaggattacacgtgttgcgataagcaacactacgctgtgtggtgcagaagggggaagggcccgggactcaatggggtaggcagtggatcttgttcttttattgctttttcaggttaaaaaaaaatcatacatgtttactgtaaggagttaaacactgaaaaagtaatatgtgacttagaaagtttaagttcttcatcccagttcccaagtttagtgaatattctttcggatttcttccatgtaattttttttttttttttaacaggatcttgctctgtcatccaggctacagtacagtggtgcgatcacagcatactatagccttgaactcctaggctcaagccatcctcctgcctcagcttaccaagtagctgggactacaggtgcacactactatacctggctaatgtttttattttttgtagagatggggtcttgctatgttgcccaggctggtctagaactcctgggctcaagcaatcctcccaccttggcctcccaaagtgctgggattacagacatgagacattgtgactggcctcatactctataaaaataatacaaaacctcattgtctggttgtatcatactttaatgtacctaatactcttgatgctaccttacatttttcagacacactgccagtaattttctaagtatgcacacaaacctcatctgtaacagaacatagcaattcttaccttcttgacagtcattatgacaaaatacaactggagatggagtagattcaagcaatgatctgaaaagaaaggtttcactgttacccatcacgcttctcagtcagctgcacacagtcttgctttctccacatggccagcaccaaattcgtgctccaaagcaacacacagtttcagagtagtatctgtgatgtgaattctgacaactgcgtcattacgtggcaacaactccacaggccctctgcactcagctcttcccccggaggacctctgcatgtgccgctccctcctggagcccctttctctgctggtctcggcttgtatagcacccccttagacagcccttctcttaccagtgacccaagcaggtcctcctatgcagactaagggcctactttgatctgtttctgtcacagcacttatcacaatttgacattattttatttgtttacttgttttccctcagcagcgatcatcaagcctagcagaggaggcacaaacctgagtaattaaaggtgtaaatacttgtggctgggtgtggtggctcgcgcctgtaatcctagcactttgggaggccgaggtgggccgatcacgaggtcaagagatcaagaccactctggccaacatggtgtaaccccatctccacaaaaatacaaaaattagctgggtgtgggggcgcatgcctgtagttccagctactcgggaggctgaggcaggagaatcacttgaacccaggagggtgaagctgcagtgagtcaagatcgcgccactgcactccagcctggcaacaaagcgagactccgtcttataaaaaaaaaaaaaaaaggtgtaaatacttgttagtgtacagatgtgagtggcctgcgccaagcatcactctgaggacaatgacggccttgcttcagagatcagtatgaagactctgtttctcgcaaaagccaaggttgaactgtaaggaagaaggatcttcctcacactccccagcctgcccttactcccttctccccaccagagaaaatccaccccaccagacactctactgccctggccaccaagccactcctttgacattttccttctcaatggaaccttcacaaactgaccagaggccacgtgtgggcttctagtccatagagtccataatctctagtcctctagagaaccataattccagatgacaaaacttatggtttaaattcatcctgtaaaaccaatgtaaaatgccagacataaggcaagctcaatcaatgtttactgacaacagttttagtgactaagaatatttaaagtcaggaaatagaaggaaaactcacctcaggttttccagttccaagggcagattgtaactgagcaatttgtggagctttttaattctggattcctcagtaaatttaattctcagcacttcctttagatacctattaaaaaattttcaaaaaagaacagaacaaagaatcaccgatcaattcaccaaggcttgctgttcttggggctttggttaaacattcaatcccagcgcagtcacaatgccagtgggacccctctgactgccatgactgaggggaagaggagtggccttgggggttcgtggcattctaggaaggtgactttcttctgtcccttcacccgttcaatagcatttttgcataagccttctttcctggtttaggaattgacttttacacacaagaaagacttacttatgagacaagtatcaccagctgacaccctgcacttcagtgaactaggaagacctctgactactgtggcaaacaaatgctcacttatggtacttctgggagccaccactgtaaaactatgttaggaccaagtgatttgaccacttacttttccattgtgccaaaaagccattttggttccttattgaatggcattttcataccatgaaatgtagccattttctcggcgatttctgcagaaatatctggcaaacttaattcttcagtatctaatcgccggctctgaaaaagaaaagggagttaaaaactgacatttaccaagtaaactaaaaagagtgagatcacacagtcttaggaacgagaagtgtttttgtagtgcatttaagtctcacccaatgccccaaattcccttaagaatggacactgtgtccctacagacagtgacccagcaattgctatggcatttctacagtgaggagccggccacctccaaagatctatttcattttgaaccctttttaactatgagaactccttccttaaattttattgaactactacactatcatctattattctggcctctaaaaccacactgaatgtctattcactacccaatgctgaagtccatgtcttcagcagtttatcacatggccccacttccagctcctccatcagctgggacattctactctgatgtgttgcaggtgagatgtggggtccagaataggtcctaaccaggagatgcgtcacagagacaggggggccgtctccagctgctcccagtggtggtgtcagcacctggcctggcacagagcaggtgtccagggcaaagttgggcaaagaaacagtgtctagaggacttcctcctggcctctgcatcctgcacttcccctaaatcagcccgaggccatgcttgtttggctgcccttttacaggaggcccatgggagctcacaatcaactgagacctccagagcttcctcatgcaacctgccaccctgcagaaatctaaagagaggtttctgtgaaaatgcaaagaagtacagcacaggggtaagagtgaatgctcccaactcagggaaacctcagttgaaattgtggctttaattctcatttcaaagctacatggccatccaagttacctcatacatctgtgtgttcccatttctatcaaatgggaatcaggacatgaattctctcacagagttgccaggagagctggaggagagaatgcagatgaggtctctgggacagcacctagcccagggtgcagctcagcaagtggcagatgtctgctactgagagctaagagctcactgtaagcattggactcaaccttctattcaactccctccagaaagcactgtcaccacagcactgtcaacaaattaccatgctgcaataagaacagggcctccacttccagcagcaggacacacaggacttattaaggtagctcactcagctttcaaaactgccattaatttggcaacaaggaaaatctgaagctaacatgctcagatatgaacaaatctcagtattccaaattccttccccagtagagaaagagaaacagactacctactatccctagtggcccggctattctcacatgccctttgaaagatggctacaggaatcatgaaactaaatcacctgatcccaagcagtgaagagtaaacctaagccaggcgtggtggctcatgcctgtaatcccagcactttgggaggccaaggcgggaggactgcttgagcccaggagtttgagaccagcctgggcaacacagggagaccccgtctctacaaaaaaataaacaaaattagtcaaacatggtggcacgtgcctgtagtcccagctactcgggaggctgaggtgagaggatcacttgagcctgggaggttgaagctgcagtgagctgagatcaggccacttatacttcactatactgggcaatagagtgagaccctatcttaaaaaaaaaaaaaaaaaaaagcaaatctagaaataacatacggtattaggttgaatcaaatgaaactgccattcttgttggtcaaaaacagtcaaacaccggcggcgtcatatggttcaaacctagtatataacagaattttaaaaaaatcttcactatggctgggtgcagtggttcacacctgtaatcctggtgacttaggaggctgagacaggagaagagcttgaagccaggagagttcaagaccagccagggtaacacagcaagacccatctctacaaaaaaaaatttttaataagctgggtgtgctggtgtgcacctgtactcccagctacctgaaaggctaaggcagaaagatcacttgagtccaggagttcgaggctgcagtgagctatgatcatgctattgcactccagcctgggcaagagagtgagactcccatctcaaaaaatttaatatataataaacaatacatacaagagcatagatagaacttaagaactagaacaaaatcagttccacagatactataatctatgtgtcctgatgcctgccctttttgtccccaagatatttttattattctgaattgtgttaacacaattcccttaccttttccaaaaagagaacttttactacatgtgcacatattcttaaacaatttttaaaatttatcaggctttatagaatggtatgatactacttacagtctcctgcagtttgatcattcaacattatgtttgtaagattcacctatattgccacttataaccatatgaggttctattatttacaaaattctttcaaaaacttatcatctcggccgggcgcggtggttcacacctgtaatcccagcactttgggaggccaaggcgggtggatcacctgaggtcgggagttcgagaccagcctagccaacatggagaaaccctgtctctactaaaacatagccaggtgccagggagcaaactaaaggaaaaagccagcgcagtgaaggcaccatccactcatctaaacacatcctcagcactggcagctagcacaacactagcacagacggacagtgccactgtcaactagaagaggatacctcttctggggagacagagcacaactagcctctctgtttctgggctgtgggattagacaaagaaacccctgcccctggtccccagccagacgcagcagagcacccctctgccaggcatcctagtgctgggctccatctgcacagatgtacagggcagccctggacatgcccaggcctctcatggataagatatctcatgcagcagggcaggaaaagctagcagcttatgattctagtcctcaaggaacttacgctcaatgaaaatggggaatatctgatctatctaggaagagagtgcaggctgacaaagacgagcattgccaatcaaagaagtattgccagggctcagagccacacttcaacacttagggttcatgagaacctctgggcatgaagcattgtgcagggcatggagtcaggggtgggtgggtagaggaacaggacctatgctttagatatgtacatgtaactctaagacatggtatactggtaaatgttacagcaacattaaaactgccttgggacaataagaaagggaaaataatcctgactgcttagaaataagactgcaaggtcttggagcaaggccttgaaatctaagaatttgaccagcatatggggacaggaagatgggaggtagggagactcagtaggaatgcacaaaacaaaccaaggaagggtgatgggaaagaacaggcatggcccccacagggctacagtcagagactgagcagggccaaggtgttctagcagcaagttctataaagcagggccctagaagttgagaggaacacggtgaaaagggcaaagtctcagggtacacagcctcaggggacaataaaatggtaagtttcatatatatttcaaatttggatgaatacacctttacagaaaagaaagaggttcggatgtaagtacaaaataaatgttgcttttcatgatttctgatacagtttaatgacataggtgaggttaacagtgaaaacacagcattgcaggttcttgcagcaatgagacaaagaagccatcttctgtctgtggcatatgtcaactaagcgtttatgaacaaatcttaccgggatgaactgctccagtcggccttggggaaagatgccatagagttttggcccaagtgacctctctgcgagaatggcaaacataacgctctccagaaccatggcctcagccccctaaaacagatggcaacaaatcaggtgtttactgagtgtttgctaagcgccaggcatcagaagcactctcacaggagtgtttcatctgatcctcatgagtattctttcacgtgggcactactgttatcatcatccccattttaaatatgaagaaacagaggttccaaagtcacacatcgtgtcatttgcaggattcatgcttgcaagcactatgctatattgataagatttaaaatatgagtttaatttaggtcactagatccaaaaatagaaaaatatccatcagtgcttttattgcttctatttatttcgcaacctatataggagtctcacccttggtatctcaccaaaggccacaacaccatccattctggtaagggttgatttgcttttggttgagtgtgtctagttaaagcaaaggatccaaaggaccttctgcctactaaattgggctcatgggtccaacaagcttgaaaattactgatttaggtccagggtctacggctttctagtccaaagagcaccctagcatggagcatcctagattgctattttcagttggcacacccgaccttttcctgttattgaatgtttgttgtcttgctgaaatctctatgatgctgtctgttctatcttcgtcctaataattaacgtgggatctatcatcattttgccttcaaaatccatgctttgatctcaaagcaaattcagtccttggtctttcccccttaaacagcacattacagcataatggtttccatctgttggagtgaaggagtcacgcttacccagaggtccacctgaatctcttaaagagcttttacaggccaggcggtggctcatgcctgtaatcccaacactttgggaggctgaggtgggaggatcacttgaggccaggagttagagaccagcctgggcaacatagtgagatgccccaccaccaccgaagtctctttttaaaaaaaagagcttttgcaaagagattcctaggtcttactccaagtattaaaagagaggcaccagcagggctgttttgaaaaagctttcagatgattctaattcaccccctgtgaagcaatgtgctgtggaggaacatgatcccagagaaacctctaaaacacattcacgttaccaaaaactgagaaaccaagaggacaaacttattaggaaatgatacagtactatagtaagaagaaaacaaaaaagaaaagctacttccaaaggatatcagaccacattaaagcaaaaagtattttggtcacttttacattttgtgggggtaaatggatttgccggtaatccccccacaattatcgtctacaaccatcattcgtataatcctcacaattatggcctgtgatcttgtgaggctcaatctttcctaatttgtggttttgtgtatatgacaataaactgataacatctatctatcaagctaatgaattttagggtgggatttgatatcagacaggttttatttcttaaaaccttagagaatgaaaacaaagatctagtatctctatttagttgtcaaaaggtttccaagaactttttagtcctatggtagtgttgtccagagatgcagtccccatcttactccaagcccaacatcacagaaagtatccggggcatttaagcaagggtctgcaaagcctcctccaagtctctgcttagacattatgctcccctgctccccagggggcagcacggtcctggtgctctgaagactgtggtccccaccaccaccctcatgctgtgtaaaacacaaaagtaaacaggggctgggcatggcaggacaagggggtgctggactcggaagttcagcattttgcacatcatgtccactgggaaggattctcggaggtgactttatttacgtgtggcatcgtcaacacatgtcaccagcactagccagaatcctctccagagctgagtcaacccagaaaggacatagagaagagggaaagagatgtaagaactttccaattctctttagcactgccctaaacattgtaaacaaaaacacacttattcttacgtaatactgtagttcaatatttattcacagtaggaagaaagggggagatggtgtatggagagaaggatttggagaggaagaaaatgaggccgggtgcggtggctcacgcctgtaatcccagcatttcgggaggctgaggagggcagatcacctgaggtcaggagtttgagaccagcgtggccaacagggtgaaaccctgtctctaccaaaaaagtataaaaactatctgggcatggtggcgggcacctgtaatcccagctactcaggaggctgaggcaggagaatcgcctgaacatgggaggcagaggttgcagtgagccgagatcacaccactgcactccagcctgggtgacagagcaagactctgtctcaaaagaaaagaaaatgaaagagaacacccaggcacaagcaagaaaaatgacaggttaaggacagcagagaatcctagaataagtgtaccaactactggtggtcttcttgtcatcactatgtctccaggcaccttcctgattgctcctgaaagtgagcatggtaaaaagggggctggacagacatggctgggttctctcctgtaccacgcactggtttagccacagctggtgacagtggagggaaaattggtcctactttttcagatatctcaacttggaacaatttacttgggcttcagaaataaagactcattaatacatttgcctaaaacacacttactcaatgtctactatgtcctggcactgtgctaagcgccagggaaccaacaaagaacaagatacataaggcccctgcccacaacggggcttacatgacagagaaggagggatggggagagagagagaaatggacagtaagcaagtacacgcagctatggactgggctcactgccatgagggaaacaagggtgactggtgtggtggtgtgggtatttctaaggaggccacactgaactgacctgagatctgaggtgtgaaaagccacagcagccccatgggagcacagggccatgaggaaggaacaagtgtgacgccttcaaggaactgagaggcctgtctcactggaacaggacaatcaaggaaaaggaagagcagagcatgagattgccgggtggactggggcttacagataccaattcacaagtcctcaacatgttgttgatgtttacagctcacaaactgggttcgatcccctggggacagaagaggaggaaccagcacaggccttaaaatgccctttcttatgtgactgtcaccacagtaagaaagctttctacagggcaccctcgcatacacccccaaaacaaacactatccccacagcaatactcactctcacaactgggcaacacttattaatattttctactctatttcattttaaaaagcaatcaacatgctaacatttcatgccccactagaggttcacaagccacaacttgaaaaactggtttaagttcaggcagcaaaaagaggggccagggcagaaggcaaggtgaggcaggcgccactgccaggaaggagagtggtattccctaatggtgctgctaagtggccattagatttggcaatatggaacctgttggtgacaaaaaaaagaacagcttcagagtgatgggtggacagatgtcagattggagcatgtgaagagtgaacagaaacgggagagagaagtggttgagaatggaacaaggggtttaaactgacttttcactttatctatgaagtttcatttatttaaaacccaggaagaagagtattgatgttatgaacttcttgagaagacataacagcatttctgtggtatttcagccaaaaatgcataacctcaattgtgagaaaacactagacaagctgaaattgaggagacatttccaaaataacggatcagtactcttcacaagtataaagattacaaataacaaaagaattgttacaggctgaaaaagactaaagagaaatagccaatgcaatcttgagatctagctaaatctcgagacagaacaaaagaaaatatgcataggaaaacttctgaaattcaattcaggtcatagttcagttattattttttttttggagatattattattattattttttttttggagatggatagcccaggctggagtgcagtggcaagatctcggctcactgaagcctccgcctcctgggttcatgcgattctcctgcctcagcctcccgagtagctaggactataggcattcactaccaagcccagcttatttttgtatttttagtaaaaacagggtttcaccctgttggccaagctggtctcaaacttgtgaccccaagtgatcagctcacctcagcctcccaaagtgctgggattacagacgtttagttatcactattgcatcaacgttaatgtcctggttttgaccattgcactgtggttatgtgagatgttcgcattagggaagctgggtgaggggtgcatgggaaatctctgtactattttttttttcttttgagtcggagtttcgcactgtcgcccaggctggagtgcactggcacgatctcggctcactgcaagctctgcctcctaggttcacgccattctcctgcctcagcctcccaagtagctaggactacaggcgcccgccaccacgcctggctaattttttttgtatttttagtagagacggggtttcaccatgttagccaggatggtctcgatctcctgacctcgtgatccacccaccttggcctcccaaagtgctaggattacggcgtgagccaccatgcccggcctctctgtactattcttgaaattttttctgtaagtctaaaattggtatgaaataaaaggttaaaaataaattcatataaaattcacataaaaaagactgaaatcggccgggcgatttcatggcgagtttgaggggcatgtgagacatccgaggagagactgctagccaatggcattagttccaagtcgaggtcagggctggaggaagaatgtagcggccctttggcctatagatcaggtgaccgagggagacaggacaacatgagaagagggcctatggtcaaatcatggggcgccctagcatgtagacagccagatctgtactttgtgtctctgtgtcatggctgccctcaggagaggaaacatttcaaaagggtgggggtcatgtcaaatgctactgagaagtcaaaataaaatgagaactgaaaagtactttggatttagcatcacgcaggtcctggtgatccaccattttcagctaacaggatgtccaaaggcctctgcacaaagggcttggaatggttcacaacagattgtcaatcacttcccacccaaggacttcccagtcactgtcactccagagagcacaagttctagatcctctagcagggcacccagagcaagacacatgtaaaacaagccgctgaaaagtgtggaaaaaatatcatcactttcattccttttttatctcaaccgttttaatgtctatttcttgatttttttcttttttttttgcatttggtggggacgactcctgtcgcccaggctggagtgcagtggcacaatctcggtctactgcaacctccgcctcccaggttcaagtaattctcctgcctcagcctcccaagtagctggaattacaggtgcccaccactatgcctggctaatttttctattttcagtagagacggggtttcaccttgttggccaggctggtctcaaactcctgacctcatgatccacctgcctcagcctcccaaaatgctgggattacaggtgtgagccaccgcattcagcctatttcttgaccattttaataatcaatatacaattggtaaaagtgatgtggcgatgtgtgtatctacatcttagacccacgtatgttgggcatgtgtgcacatgcacccttctctgtgagcctgcacataatggcagagatgctcaaaaggtgcttacgctggggcatgcagaccaacaccccagacccctgcctctgaggctccatcggtcagtgctcttggcctcaagccatctgcacatgtgtgtttcagagagtggggtcacattctctaagtctaggaagaagcttttccaacttgggtatcatccataggaaaaaacattgctgttagcccatggaaaatgggtggccaccaaaaccactgggcagtgacccgcttcctgatgggaagtgtgggaacgaccagaaagggggtgagagaggcatcacagcagcggcagccagggcctcctcatcaggtaccacacacgaatgctcccctggctgccatctgccaacatccgaatgctgtttcgattgccataaagacaccaaacttccacagtctacactctcaggaggaatgaggaatacccaccgctcactcagtctccgtaaggtggcttctgatagatataccaagagcccctcctcgtagaaagatagatcaggattttccaagggtagataagaggcactgccaagccctggagtagcgaagggtggctaacactagttcacatctcacacagatgcagaaagactgaattacttacttgaaattcattttctttctgagcttgttcggatccctctttattacaggacctctatgaatgagaaaaaggaaacacttctggtgagatggggaacactaaacagacactaactttgcaaccaccagaacagtcagggtttacaaaacatcacaggtctttaaggaaggtttctcagcccaccgatgtgacgggcagcatctaatgcaccagcagcctccagcactagtaccaacaccttagaaagtgcttcattgctttacgagaaaagggatgtgccggtgagacccgatagctgcacgtctcacagccgccccatgtacctttcacaatttcattgttagaggaaagtcaatagagtgcactcttccaatcaggccttctaaagacaagcggtcaggctgagtctctcaccaatttagctacgtggttctctcaagtcaacctgcaagaacagggagtgtaaacatgcctgtggacagctgtggtcagcacagaacttggacagagaagaaagcgctgtgcaggcaggaaacctggcacaaaatctgtgcagacatgccctgccgactcgccactttcccagagtaacccctctagttcagccggtcaccagctcaagctgaactgttcctctaccataaagaggactgtgtgtatttaataaagtctctaaaattatttcatatattaatatattaagaaatacttatatcactttcctcaatgaaattgcaaatttatgataaccaggattctagcaataacaacacactagatcattaactaccataaacaacccttgggctacattctttctcatggtacagatcatatattttaagagcaaccccccaccccaaatgctttaaaatccttcgtactatctttaataagggaatggggaaaagtaaagtcagaaacttgtgtcacgtcaaacttttatactcaaatactgcctctaaaaatgttacttgttaaattaaactaagtctgcttaagccagacacaaaaggaatcccagaaaggaaacctctttaaaaaaatttaaggtaacagattcttgaacaccccatgaaaaacatacctttccattccacagctttatcaaaaatacctgtaccaagggtggaaagtgtggacaggaaaaaaaatgccacgttaagcaacaccagctactctagcaccaatcaaaaacctagtgatttaaagcaaccactcatccatcacacactgaaataacattacagacgttttaatgcatgttttgtataaacagtacatgtaatataaaagtaaacaaaataagtatccatgttcataaatctatttgcaaaaggctcttaacgtttgcactgatacatattcaatactatatttagcatacagttaagtacatttggtacaaagtacagaaagtacaaatggggatttatgatattttcatttgtgtaatctgcagttctctgatgaaaagatgttacaggttaaatcccgttacaatgaaagctataaaaatcaaaatactacaaaaatgctttcagatctttgcagatggtttgatgtgcgatgtggtaggcgctggaaagcttcccttcaccctaattccaaacactctcgtggccgcatcgttccttagactctgctttgcgggtcgcctcttccaagcagtctgtaaattcctaatgaatagggactgcgtcttttattgatgttagtcttctcccagagcaccaagcaaatctcgatgcccactacactttttaggctgcatgaataaatgaacactccggagtggtatagcacgaggcaagtgagcccaacgagctgcctggtgccacgcagccaaccagtgatagcaaattcccatccagggtcttggtaacaaggaagctggctgtggggttaattagaaatgccccttcaaaagtccttgtgtttttttctccaaagaaacttaagaacaaaaaagttctataatctgatatattacatattaatactttgcagtataagctttaagacaaataagttagatactcttctgaaattgttgtaacgggatttgacctgtacacaattctaaatgactatggttattcctatgctgttgttactctaactgtatcttcttagggagatacagttaatgggttatttagccttcagaagtccctttcccttatctaatggcgctcgcaaaagcaagttacttcatccaaagttaaaaattggctgaggccccaaagtctttcctttttttaaacatattggcactataagtggtagtaaatccatgataatctcccctgcccactccctcactccacccccagatgaattcatcacttataccataagagcaccattatgaaggcaagatggacttctgcaatatccagccctctgttctgtttcctcagtacagaatgttcaggctccctaagtcctgtaaataagaagtgtaagacgaggaaatctcaaaccaagtgtatattcatggaaaggtaagagaataactttttcgtccaggaagacaggaagttaaatatattttggggccggcgggggtggcccatgcctgtaatcccagcactttgggaggctgaggcaggtggatcatctcaggtcaggagcttgagatcagcctggccaacatggtgaaactccaactctactaaaaatacaaaaaaattagccgggcatagtggcgcatgcctgtaatcccagctactcaggaggctgaggcaggagaatcgcttgaatccgggaagaagaggttgtagtgagccaagatcacgccactgcactccagcctgggtgacaagagcaaaactctgactcaaaaaaaaaaaaaaatacatatatacgtatatatacacatatatatacgtatatgtgtatatacatgtgtatatatatacacatatacgtatatatatgtgtatatatatatacacatatatacgtatatgtgtatatatatacacacatatacgtatatatgtgtatatatatatacacatatatatacgtatatatatgtgtgtatatatatataggaatccgtgggattttacttcagtgacataaattcatttgaagtagatattaaaatacattgtataaatatttagtatgacatccaacttttctctaacaagttaataaaaattatcctctataagttataaaacaaaactaagctttttacatttattagaaatttgaacactggttatttaatattaagtaattattaaatttttttaatgtgaacattactgtggtcatttttaaaaaatcatcttatatagatacagactgaaatatttacagaataatataacatctggaatttgcttcaaaataaccctggtggagtaaatgagggaaaagatggaagaagactggctgtgaggggaagatgaggaatggacactggggttcattatactcttctactttagggtatatctgaaattccccataataaaaacttttaaaaaataaacattgaaatttcaagacctaagaaatcagaatgtctcaattatgcctaagacacccaactccataaatacactgaaaaccactgaattctacacttaaaaggcacacaataatgaaaaatatattgccactggcttcctcccaccttctttctttccttcctattttgggcttagttttcaagagaatcttaagttagagtcatatattcattagcctgtgatgtaggaaacaaatgaggctacagtgacagcattaataaaggaggcatacttactattttaaagttagcttttaagaggtgaaactttaaaaaaaaaatttggagactgggtctcgctctgtctctcaggttggagtgcagtggcaggaatagggctcactgcagcctcaacctccccaggtcgagcaatcctcctgtattagcctcccaagtagcaggaccacaggcatgtgccaccatacctagcctttttttttttcttgtagagacaagatctcactatgttacccaggctgctcttgaattcctgagctcaagtgatcctcctgccacagtctcccaaagggctgagattacaggcatgagccaccatgaccagcctgaaaaagattttttgattggccaagaacttttaaatttaaaaactaaattcctgaaagtctgaattatattagctatggagtaaaatgagaaaatagaggactttcatttttactttatttctatactttaaaaagtgcttaaaagcgtgtattatttttataataaatacatttgatacaaggtttcaaatgttacttttctaacaaaattgcaatttaaggctttggggtttttttgtttgttttgttttttgtttttgagacagcgtctcactctgtcacccaggctagagtgcagtggtgcaatctcagctcactgcaacctccacctcctgggttcaagcgattctcccacctcagcctccggaatagttgggattacaggtgtgtgccaccacgcccggctatttaggctttgtattttaaatgagactatgaaaagcagtaaatattcatattacagagcacaggttttcaaaatgttctacttcatgctttaaaaataaaatgggccaggcacggtggctcacgcctgtaatcccaacactttgggaggccgaggcaggcggatcacgaggtcaagagatcgacaccatccttgccaacatggtgaaaccccttctctactaaaaatacaaaaattagctgggtgtggtgatgtgcgcctgtaagtctcagctactcgggaagctgaggcaggagaatcacttgaacccaggaggccgaggttgcagtgagccaagatcgcgccactgcaccccagcctggcgacagcgagactctgtctcataaaataaaaatacaataaaaaaaatcaataagtggtaagacaactccaggaccaaggaggaagagatgtccctttattgtattttgtgttatatgattttaggattcaaaaacctactttaagttacctaatgttccacaatatagcaggtatatttcttttaacctatttaagccatcagacagaataaacttatttggccagtacttaatgaaagacttctctaatactgagggaagtaggtttatgactaaatgaataaagccccatttgggagatgaaaacaaagcagcacctcagttttccctagagtctgtgtatagtaagaatgggtgaaagcggcataaagaaagtgtcattaagtcacatatagttatcatttaaatgtcatttggctgggcgtggtggctcacgcctgtaatcccaacactttgggaggccaagatgggcggatcacgaggtcaggggattgagaccatcctggctgacacagtgaaacaccgtctctactaaaaatacaaaaaattgcctggcgcggtggcgggcgcctgttgtcccagctactcgggaggctgaggcaggagaatggcgtgaacccgggaggcggagcttgcagtgagcagagatcgtgccacttcactccagcctgggcgacagagcgagactccgtctcaaaaaaaaaaaatgtcatttaaaacatctttaacacccaaaacatttatcttcaaagtatctttaaacgtccaatactacatgagctgctgtgagacagattttaaaaagtgatgaatcagctacaaagaatagcatgtcatcaatagcaaaataaattggaaatgctatttaagaaacgaaatcattatcaattatggataatataatatgagccaggcatggtggctcacattggtaaccttagcactttgggaggttgaggggggcggatcatttgaggtcaggagttcaaaaccatcctggccaacatggtgaaacccaatctctactaaaaatacaaaaaaattagccgggtctggtggcaagtgcctgtaatctcagctacttggaaggctgaggcgggagaatcgcttgaacctgggaggcagagattgtagtgagccaagatcacaccactgcactccagcctgggcaatagagtgagacttcatctcacacacacacacaaaaaaatcataatatagaatagaaataggtactatgttaaatataatggtggctgctgaactaaaatgatatataaataagagtacaggttttttatagaaaaaaaattgtgccatccattttttaatagaaaaaaagaaaaatacacacaaaaaaagaaaattaagaaacatggatgacattctcttcttcctaccaccccttcctcaccaaaaaataactaaatggatcattcagcttactgtctcttttaaaggctttacataaaacggtagattgattgtgaccttttaaaaatgctttgagacctataaataaataagtaagaataatcctgtctgggtgcagtggctcacgcctgtaatcccagcacgttgggaggccgaggtgggtggatcacctgaggttgggaatttgagaccagcctgaccaacatggtgaaaccctgtctctacttaaaatacaaaaattagtcaggtatagtggcacatgcctgtaatcccagctactcaggggactgaggcataagaatcgcttgaacctgagaggcagaggttgccgcgagctaagatcacgccattgcactctagcttgggcgacagtgggaggctgtctcaaaaaaaaaaaaaaaaaaaaaaaaaaaattcctactgttagctagactcagtttcctcagtttctaggatatgtaaattttggtctcggaaaataatccatctttctactaatctggtattatcttcctgagctgagtactgaaacaactcccaggtcatcgtattcaccctgagaataggaggatatggtgcatcattcggattcaattcagtagctgtgatgcccatttggtcttggagtggcatgaacttctttactgtgtagcctgtggcttcggagacccttaatacccaccctggttatctcaccacactcaaccctctaggagagaaataatttttaatacaggggtggcatctgttataatccctggcctgccaagtccctgttgatgatgaagctatgttccatctcaggagaggtggggcaggaaaaagcatgagaaccatgactctatagaatgtgttcaattctatagaattgaaagagttatgtgactctttcaattaacattttgcagtatattttcttggcaatatgttttcttctcagagttatcatggaccctaaccttacttcttcctgatttctatgaaaaaaaatgaaatcatcccgtatttcttgcttttatggtttcttacagcattctttctcgaactcctgacctcagtgatccaactcgcctcagcctcccaaagtgctgggattacaggtgtgagccactatgcccggccacttttagcactttctgaaaacattttacagaacacattaaaatgtgagatctcaatgcaatgatttaaagtatagcttatgtgattatttaataagcacatatgaattacaagaatttaaacagataagtgatttctaacattttatggtagtctctagagtgtcttcaattatcccaaggaccagcctaaaacaccttgatctttttggacattaataatttcaaaattggatgacttgatgaatatccgtaggaaactagaacttctaaaacactttaggcaacacaagccagcagaaagacaggtgagtggaagcccaggttttaaaaaggcctatttcaggaccttctcaaaatctatgtctgatctagggcaacctgctgacccaacactcctcagacttccaagactaaataaaataccctccctctaagtatcccaaaggttgacttgcaagcaacacttttacgggaagtgtgccttcactacatcaagtcagcactgcagagctccctaaggtctcaggtacccagctaagacatatgaaagtatactgactggtaaggacaaagaagaaggtttgtttctaattctgaccaaaatatcaaaatatatatggtgtctccttaatgctggaagtgatatgaaggaagaacttgattacttcaattaagttatcaagttgaggcccataaatttctaaaattcctaaatgtttgtcattttctactgaggaaacagaagaaaggaatctgatttgctttggacaaaaaaaataagtgatatatttattacacaacattctgaaatcttaatcactgtacctctttaagcacagcacaaactgtagctggtgctacttaacaagcattacaactttcttttttaaaagcaattcttgaatccaagaactaaaagaaagaaattaaagctgtagagaatgctccaacttcagaggtctcatactataccgtgaatcgtgtctgtcacctggaaaccagagtgctccaggcacgatcgcatggacaagcctgcagcagagaacacatgcacatacagctaaagtggtacattacccccaacgcccttcactccacccaacataaagacattccttcccaaagaggggtgggctgcggtcaaaccatcgttccatggaccagaaatccgcattggcttcatgctataaatcccaaacatttaataccagcaagacaaagacactctgaatatgtaaaaattagacatagtagtctgtggtttatttggttatcaaaagaaggcaccaaagcaggtatggaaggactattggtagtaatttggcaactatcttgggagagtatcagctaaagaaatattaggttagaccaaatgggaacgcacaacactagaaaaatgttttacttctgagaaggaagttttgactgccttaggaacacagaattaaaccatactcaaaagtataagggaatttttttaaagcagagtgaacagaacaacttaaattcctaatgatcctaacacaatgaggaaaacagtggcaattcatagaattcagttaccagggacatgactccttcaaggagtaccagcaatgctggtctttgcatggtgtgaccttagtaacataaagaaataggttttagcagctgatttctcagtagctggtagtttaatattaactatttatgagttattccatattttattgtggcttaatttttaattaaactggggctaagagaaaatagggaggaagacatttgttttctagatttaaaaaggacagtgtctcaaatttgactcttttaagttgctaatacatatctgcgttgtgccttgatgcctttattatggttagtactcaaacaagcactaatattagccttctattactcaaaaaacaaacaaaaacaattttccagacaacattcaagagagatctttgatgtgtattataaacgttcatgcctgtgagaccgctcataacggtgaggccaaatctctccactcatgcacagaaggaagtggcttaacacagagtcactgttctgacagaggaagggacaaagcaatcctctgagacttccgccaactggcacaggttacattgaatgaacaatacgtactgacatttgtgtcttccacaattcatgataaataagcaaactggttatttgtaatcagccaaacttgcttctctgaaaaggctgctactggacgttgcagagctcatgttccttcccagtatcagaaaggaaaaaaatcaagttacatttatagctaattttatacatttacgctctcttctagcaattctatctctttccacaatgcaaaggctgaactattacttctcaaaacttctattaaattatcctcctttagttcagggtagttttacagttgagtttggttttcataatctatgtagctaatgaaaataatctcatttccattaaaattaaagacagtctatgtaaaacagacgctaaattatactcacatgcattaagatcagaccaatatttttatgtttaataatttcctacaaataatattgtatagttgtgtgtgtcttatcttgttcatattttcaaaaggacccattcttgaccttgccaaacacaggaattttcataagcaccctaaaactaacacaaatactaaacaaaaactccaggatacagtcaggaagtttgtttccgtctcatcttagatagaaataggggctagaagagacagatgtttgtgggacagaagctgtggagctgaacccaatcagaaagttttaccttggctttctggcacttaacccttagagaactgtaccaaagagcagtcatttcagtgtcactatggaaataaaggaaatcagacatcttataatgccaagatgaagaaaaatgagaaagttgagaatcatctagttattttaaaccaagtcacctgtaaatcatttgctgatcaaagaacgtgtaaaatgttaccacctctgattctcacagaggtaaaatgttcaaaagctaaaaacaaggaagagaaatggaaagaagggacatactaaactaaatctgtcatataattaaggaaaaatgcaaaatactctgaaaaaatacatagacctattatttgtgcagtagacttcaattaacatttttcaaagaaggagtgaattctaacccatcttaaaggacattatagctgcatttataaagttggcttgggagataccagttatattgtataagtacacatacatgtataggatatgtgtatgctttcccataaggtagagcaaaaagaaggaaagcagaagacttgagtcatactatatttaattctctctttaaccatgatgtgatttattattgggggctctgtatttgctcagccacatctctcaattaatgcaaatcttgacaattttttatcaatcctgacaatttatcataaattctggctttttttgttgtgataggaacaaaaccctcattgtagaccataaatatctccttccattataggccagattcattctaaagagctggctatacattagcaatttcatcacagctagatcacagcaaaaataaataatagaaactttaaagctgatttgaaaatatttggaaaggaatttaaaatcctcggcacagtgtgtggcagctcagcttctaaagcacacagcagctgttgcctggctcgcatcttagaagcttctaagcctgttctctactttgcttcttttgtaccatagccatcttttggagttcttgattttggttcccctcctcatgttgtcacagtactcccaatgaccaacagtctccaatggccattaatatctgaaactcttaactggcaacaagtatgactgctaaactctgcagagctaggaaaccaaatatacttaactctgagactctaggcttcatggtttcctaagtttaaactacaaccaaaaaagtgtgtttgaactaaggactcgaccaactgaataattatattgaaaatatagattcccacctaagaagcaaagaaatagtttttttctaacaaaaatcagtttgttgtctatgtcaactgtcagattgttagaggtatgcttattatccgtatagaaaactactaatttcccatccagttttttttgggttttttttttttttttttgagacggggtctctctctgtcccccaggctgcagtgcagtggcatgatcttggctcactgcaatctccacctcctgggcttaagagatcttctcacctcagcctccaaagttgctgggaccacaggcacatgccaccacgcccagctatttttttatagagatagggtttggccatgttgcccaggctggtttcaaactcctggactcaagcaatccacctgccttggcctcccaaagtgttggaattacaggagtgagccaccatgaccagccctaatttccctttctatccaaggtgctttcaagtatggtttctaccttacatcagtagatatagcttcaggaatggaaactcatttaacatttgcctaataaaaatataactgagaagctaaatgtagggtacctcctccccccaaattggaattatatgtaaaacatactccattctattagtttggtaagagctaattacattttaagtggcttaaattattctttttatttttcttagttacttaatagtcttttttcttagaaataaatcgggacatagaattctgttcaaacaaattttatttccagacatttctactgtatttaactactgtcaggtactacttccagactgctaaaatttcaaaatggaagaaagactaacaattgacaatgaatctttattagaggaaggctaattgccaagtagtaggctatgctgcagctggcttttactaagtgactcatataataaaccagaacattctagagttgggctgtccaatacagtggccacgagctacatgtgactattttaatttaaattaattaaaattaaaaacaatttaaaactcagttcaacagccacacttgccacattccacatattcgttagtgacatgtggctgatgacgagtgtatcagacagcacagatgcagaaccctccattactcccatcactatagcactgttctagagcacaggattaaactcccaggttagtctagcccacagaggagcaccttgtaacacatttaaaatgcttcttaagttagaaatgaaagcctcataaatcagatttaaacaatagttttaaatcacatgtaatttcagcatctacttattattgtaaaagtgttgtataaatgcaaaacacaaaaaacagcagaaatgggacttaatcgttgcagaacgtaaacagtcctcaaagaaaaaatgactatcaagacatagcaggccaagtgcagtggttcatgcctgtaatcctagcattttgagaggactagacgggtgcatcacttaaggccaggagtttgagaccatcctgggaaacatggtgaaaccctgcctctacaaaaaatacaaaattagctgggcgtggtggctcactcctgtagtcccagctactcaggaggctgaggtgggaggatcacctgagcccaggaggtcgaggctgcagtgagccatggttgtgccactacactacagcctgggtggcaaagtgagatcctgtctcaaaaaataaaggcacaccagtaaaagtgccaaaataatgatgaaagatttcaaaaactatactttgaaactgcaacctgattaaatttaaaacccaagctgcatggtgaacacaagaatcttttctgcttgtgtattaacagcaaggggtctgtgttttcagctggcatcaactgttgtcctagctggatgccagctatctgcacctaatgacaaagtgacctcagatatcctcagcaagtgcacacgtgtgtggaatagctacgtaccttcaaacatactaacttgttcccagcatttttagatcttaaccatttccacagcttgacagagtcaaggaaaagctatccaattaaagggtttcttcacattatgacaatttttttaatgaattaacatctagactgccaatttgaactttaatatttctaaacatataatcaaatatcatatggatatgatctactttttagattgagctgaaataggccggtcttttaaaaaatttagtttgaaaactactctgctctatttcattaagataaaaatgggcccttccaaagaagattaaaatggatatcagggccaggcgcggtggctcatgcctgtaatcccagtactttgtgaggccaaggcgggcaggtcacaaggtcaggagatcgaaaccatcctggctaacatggtgaaacctcatctctactaaaaatacaaaaattagccaggcgtggtggcggacacctgtagtcccagctacttgaaaggctgaggcaggagaatggcgtgaacccaggaggcgcagcttgcagtgagctgagattgcaccactgcactccagcctgggcaacagagcaagactccatctcaaaaaaaaaaaaaaaaaaaaaaaaaaagccaggcacggtggctcacacctataatcccagcactttggaggccaaggtggacggatcacgaggtcaggagatcgagaccatcctggctaacacggtgaaaccccgtctctactaaaaatacaaaaagtgagccaggcgtggtggcaggcacctgtagtcccagctactcaggaggctgaggcaggagaatggcgtgaacccgggaggcagagtttgcagtaagccgagattgcaccactgcacaccagcctgggtgacagagcaagactccgtcgcaaaaaaaaaaaaaaaaaaaaaaaaaacaacaggtatcaaaatcctaccacaggccaggcgtggtggctcacacctgtaatcccagcaccgcgagagggtgaggcgggcagatcacctgaggtcacaagtttgagaccagcctggccaacatggtgaaaccctgtctctactaaaaatacaaaaattaggcgggtgtagtggcacacccataatcccagctactcggaaagctgaggcaggagaatggcttgaacccgggaggcagaggctgcagtgagccgagatcgtgccactgcattccagcctgagctacacagccagactccatctcaggaaaaaaaaaaaaaattctaccacagaaatacctcaacctggccgggtgcggtggctcatgcctgtaatcccagcactttgggggaccacggcgggtggatcacttgaggtcaggagtttgagaccagcctgaccaacatggtgaaaccccgtctctactaaaaaagtacaaaattagccaggcgtggtggcatgcataacgtcagctacttgggaggcttaggcaggagaatcacttgaacccgggaggcagaggttgcagtgagctgagatcacgccattgcactccagcctgggcaacaagagtgaaactccatctcaaaaatatatatatcaacctaatatttctaccgtgctcaatgaaatagtaaattcatgacattaataataataataataaacccagacaagttgggatatcctataactggataattcaataggtactttaagaattagattatctaatataaaactttagaaagattatgactgtaacaaacaactcaaagttttaaagaaatctcagagaaacagttattaaattcagcttcgttgagatcatactttgttaactgggactatcctctaaaatcttttggataatgttataaaaacaataccttctccacattagaactttataatctaaatctgagctgaaaattttaatcaatatgtagaaccaagaatcatcaagcactattgaagatttaaccaacattgtaccttctctggatgtaaaactgggaatacttgcactagtttactaataaataataactaaaaaaaacacgaattaacttagaatgcaaaccaagctgtgcagcccaattaaagtaaaagtaaaagcaatatactcaaatatctttagtaacaccattaaagtatttaaaatctctttccaaggtatctcagcaaagaggatttaaaatgttaacaggatccccccctcccaaagtagcctaccaactcaccatctgcaaaatcgctccatacagccgcaggagcactttccgaggctcatcaccaagggtggctgtggtgtcaggtagggagcactggaacagcatgttgctaaggccgcctctgtcagaaataagaggacagtaagtatctttattgcaggtgagctaaatcactcttcttggataaatatggatgaaaagtcagggttacacaagaactgttctcatcttatctcgatttattctctcaatttaactccatgagtcacattaaaaacagacaaattccctttctgtttttctgcagtagaggtggggaagcgtttttgaaattgcccgtgtgggccgggcacggtggctcacgcctgtaatcccagcactttgggaggccgaggcgggtggatcacaaggtcaaggaatctagaccatcctggctaacacggtgaaaccccgtctctactaaaaaaatacaaaaaattagccaggcgtggtggcaggtgcctgtagtcccagcaactcaggaggctgaggcaggagaatggcatgaacccgggaggcgaagcttgcagtgagccgagatggcaccactgcactccagcctgggcgacagagcaagactccgtctcaaaaaaaaaaaaaaaaaaatcttgaggcaatatttaaaccttcttctctagggctttccatttgatatgtattaatagttccaagatcttctacgctagtgttactaaaaatctgtcaactgattttgactaggagcttgttcaaaaaactcccaacattaactggttaccacggccttcagatgaaacaggagacctcaatactctaatcacacaccaagtaagtagctaagcaaggaatcaaacccaggcatatggctcgagtccctgcttgtaactaaccatgaagagttgtcaaagagataggaggcaaagctggagagcaccatgtgccacattaaagacattacaggaggtcgggcgcagtggctcatgcctgtaatcccagcactttgggaggccaaggcaggtggatcacctgaggtcaagagtttgacaccagcctggccaacatggtgaaagcctgtctctactaaaaatataaattagccgggtgtggtggcacacaccttgtaataccagctacttgagaggctgaggcagaagaatcgcttgaacccaggaggcagaggttgcagtgagccgttatcgcgccactgtactccagcctgggcgacagagtgagactcctatctcaaaaaaaaaaaaaaaaaaaaagaaaaagaaaagataaaagaaaaatgtcataggagctgcgtgagctgcaaaatcaccttccatcaggactactctctataaacctctatgacacaaacatctccatgtcctattactgctataacaaattactacaaatttagtggcttaaaactgaaaacagattctgatcgagctcattaatttttaaaaataagggtaactaggtggaaatggggagttggtttaagtttaatgggtacagagtttcagtttgggaagacgacaacattctggagacggatggtggtgatggcagcacaacaatgaatgtacttaatgccactaaactatatatttttaaattgttaaaattgtatttttaatgctgcttattttaccacaattttacttgattttatttatttatttatttttttcagagagggttttgctctgtcatccaggctagagtacagtggcacaatctcggctcactgcaacctccaccacccaggttcaagcgattctcctgcctcagccccccaagtagctgggattacaggtgtatgccagcatgcttagctaatttttgtatttttggtagaaacggagttttgccaggctgctctggaactcctgacctcaggtgatccacccatctcggcctcccaaagtgctagaattacaggcacaccatgcctgaccttattttaccacagttttaataaaaaagtatgaagtactgatatatactacaacatgaaacttaaaaacattatgctaagtgaaagaagacagtcacaaaagaccacatgttatatgattccattcatatgaactgtccagaacaaggaaatctataaagtccattagtggttgccaggagctggggtgggaaggggtacttaggggtaggggatgatagctaaaagtttctttttgaaagatgaaaatgttctaaaactgactgtggtaacagctgcaagtatctgtgattacactaaaagccactggactgtacaatttaaatgggtgaattgtatggtttgtgaactatatctcattttcttaccaaataaaaaatttgaatgtgcttctagcacaaacaattttttcccagatttaagtaagacatatttaagaggttttttcaaaggttacttaaaatgaaaaaccatcatgagtctctaggaacaagacagcaagagtcaggatctattttcccagaaggttgtctaccttagttaaaaagaacaaaaataaaagggaacccaaagttcttgttttcccaaagcaagctgtgaagcaggccgacagcgtgtagatcaaaggaaccaaaagcagccttaacctttctgttaaacttggcgtggcgcctcaactgtgtggcttatcagaatccccctgccgcgtctggtcacagccaacatgggtttctggctaccaagcaacagaacgggcattaaaacagagttaaaagccctagtttttcttccggtcacatactctggaaatctcagtcaaatgcaaaggcaaacagatgaagtactgttctaaattgtgtaacctgattcaaagtttacccccgtactgctaaagaaggaaggcagactagcttggccagaaacaagctcacaacctggaaacccttcaactgctttttattacctgtagcctctattgttcaataggttttagtgaataaattgtcaattattttttagtgacagtcaaaataaatgaagcaaggtgactggcaccaataacccaaactgtgagaaatttacctagaaaaaaagccaactaccaatgagtcaaataataatatgaccaggaacaataaaatgtggtaggaagaaatgccagaaatggtagcaaaaatgtaacagttcaatttatcatataatttgtcaaaaatatcctcccaagtaaaaccccaggagctctcaaggatttgcaagaagttttgaaaccacaaactttatcacctggcataatagctttataagtcataattagatatgagaggcatgggctggatgtggcggctcacgcctgtaatcctagcactttgggaggctgaggcgggcagatcacttgaggtcaggagttcaagaccagcctggccaacatggtgaaaccctgtctctactaaaaatacaaaaattagccgggcatggtggcacgtgcctgtaatcccagctactcaggaggctgaggcaggagaactacttgaacccgagaggcagagattgcagtgagccgagattgtgccattgcactccagcctgggggacaagaacgaaacatcatctccaataaataaatacataaataaataaataaataaataaataaatacaagagcgaaacatcatctccaataaataaataaataaatttaaatatatatatgcacacacacacacatatatatgagaggcacaagatactcaagcaaaatctcaaatacagtgacaataacacacttattccacactcaacacaatgacaggaaggaaacagaaaaaagcaggaagtacctgctggcaggaattctcacccctgccctccagacccagtggtgcacgcatcactaactgtcaacccatgattccttaaaacagaatactaagggaataacaagcagtataaagaggttcttttttttttttttttttttttttttttgagacggagtctcactctgtcacccaggctggagtgcaacagcgcgatctcggctcactgcaagctccacctcccaggttcacaccattctcctgcctcagcctcccaagtagctgggactacaggcgcccaccaccacaccgggctaatttttttgtatttttagtagagacggggtttcaccgtgttagccaggatggtctcgatctcctgacctcatgatctacctgtctcagccccccaaagtgctgggattacaggcgtgagccaccacgctggtccaaagaggttattttacataaattgttgagcaaaaatgaaatgaatcatttcagcttctcttgatagccagaaaaacaaggcaagagaaagaaataaaaggcatccaaattggaaatgaagttaaattatccctgtttgcagacaacatgatcttacatatagaaaaccctaaagaccccaccaaaaaactatgagaactaataagttcagtaagattgcaggatacaaaatcaacatacaaaaatcagtagcagtattatttctaaacgggaggctcaggtgggaagatcacttgagcccaggaggtcaaggctggagtgagctgtgatcacgccactgcatgccagctaatagcaaattatctggaatggaaatcaagaaaacaatcctgtttacaatagctaacaaaaaaaaaaagaaaagaaaaagaaagaaatttaaccaaggaggtgaaagagctctgcaatgaaaactttaaaatattgatcagagaaactgaagacacaaataaatggaacaatatcccatgttcatgtattagaagaattaatattgttaaaatgtccatactggccaagcgcgtggctgacgcctgtaatcccaacactttgggaggctgaggtgggctgatcacctgaggccaggagttcaagaccagcctcgccaacatgataaaatcctgcctctactaaaaatacaaaaattagctgggcatggtggtgggcgcctgtaatcccagctactcgggaggctgaggcaggagaatctcttgaactcaggaggcggaggtggcagtgagccaagatcacgccactgcactccagcctgggtgacagagcaagactctgtctcaaaaaaaaaaaaagaaaaaaaaaagtccatactacccaaagcaatctatacattcaatgcaatccctatcaaaataccaatgacattcttcatagaaataggaaaaccaatcctaaaatttatatgaaatcacaaaagaccccagtagccaaagcaatctggagcaaaaagaacaaagctagaggaatcacactacctaacttcaacatatactacaaagtcatagtaaccaaaacagcatggtgttggcataaaaacagacagagaccaatataacagaataaaagcccacaaattaatccacacttacagctacctgattttcaacaagtgtcaagaacacaatagggaaaaagacagtctcttcaataaacagtgttgggaaaactggatatcgcacgcacaagaatgaaattagatccttatctcacaccatatacaaaaataaactccaaaatggatcgaaaacttaaagtaagacctgaaactatgaaactgccataagaaaacatagggaaaaagcttcatgaccttggtctgagccaggaattttttttaaaagacctcaaaagcacaggcaacacaaacaaaaataaacaaataggattatagcagactaaaaagcttctgcacagcaaaggaaacaagagtgaagaaacaacctacagaatggaagaatctatttgcaaactatacatcagttaaggggataatatagaaaatatacaaggaactcacagcaaagaaaggaaaggaaaccaattaaaaaatggacaccagctactcaagaggctgaggcaagaggatcactagagcccaggaagtcaaggctgcactgtactttagcctgggtgacagagcaagaccctgtttaaaaaaaaaaaaatatatttgccctaaatggtggcgtgtgcctatattcccagcttgggaggctgacataggaggattgtttgagcctaagagtttgaggctgaagtaagctatgaatgcaccactgtactccagcctggatgacagagcaagattccatccctcaataacaaaaacaaggcaaaagacccaacagacatttatcaaaagatgacaaataaatggccagaaagccacatgtggtaggtagcacgtgcctgcagtcccaactactcgggaggttgagatgggaggatcacttgagcctgggaggttgaggctgcaaatgagctgtgattgtgctactgcactccagcctgggtgacggagcaagaccctgtctcagtaaatttaaaaaaaataaaataaatggccaacaggtatatgaaaaaatgctgaccaccactagtcattattagactgtctattttcaatgataaaagataacaaacgttgacaaggatgtggagaaaagggaacccttacacactgttgatggcaatgtaagttagtacagatatgaaaaacagtatgcagggtcctcagaaaattaaaaatagaattaccattaagatccagctcctgctcatcaaagcaagtttaaaaaaaaaaaatccaggcttggtgcagtggctcatgcgtgtaatccccgcactttggaaggctgaggcgggcagatcacctgaggtcgggaattcgagatcagcctggccaacatggtgaaactctgtctctattaaaaaaacaaaaaaattagccacgcatggtggtgtacatctgtaatcccagctatttgtgaggaggaagcacgagaatcacttgaacccgggaggcagtgttgcagtgagccgagatcacaccactgcactccagcctgggagacagagcaaggctcagtctcaaaaaaataaaaaataaataaattaattaaataaaataaaaaattaaaaatccagcaatcccattactggtaatacatccagaggaaatgaaatcagtacatcagacatctacactctcatgtatattgcagcactagtcacaaaagccatcaattgattatagaataaatgtaagtgtccatcaacagatgaataaagaaaatgtggtatatatacacagtagaatcctattaagccttataaaagcaggaaattctgtcatttgtgacaatatggatgaacctggaggacagtacttatattaagcaaagtaagtcaggcacagaaagacagtaacaatgtgatctcacttgtgtagaatctaaaaaagttgatctcatagaagttgagaatagtgcttaccagaggcgaggggaggggagacagggagaggttggccaactggtacaatattatagtcagatggaaggaataaattcaccttatacctcataaataggacaattattattattattattttttgagactgagttttgctctatcatccaggctggagtgcaatggtgcaatctcggctcaccgcaacctccgcctctcaggtttaagcggttctcatgcattagtctcctgagtagctaggattcaggctcccactaccatgcccagctaataatttttgtatttttagtacagatagggttgcaccatgttggtcagctggtctcgaactcctgacctcaagtgatccaaccgcctcggcctcccaaattgctgggataacaggcgtgagccaccgcacccgaccaatatgtacaattattacatgtcaattataaacattatgaataatgctccattgcctcagcacttacatcaaatacacaggttataaaattataaaattctggccgggcacagtggctcacgcctggaatcccagcactttgggaggcaaagacgggcagatcatctgaggtcaggagttcaagaccagcctgatcaacatggtgaaaccctgtctctactaaaaatacaaaattagccaggcgtggtggcacatgtctgtaatctcagctactcaggaggctgaggcaggagaatcgcttgaacccgggagatggaggctgcagtgagttgagatcgtaccattgcactccagcctcggcaacagagtgaaactccatctcaaaaaaaaaaagagattatttaatgcctgttacattctatagcactataaaacaagaaaaacccatgctacatgctacagtgatacaacaacttagtaggctgcccaaggtcttgaaatatgtcatctctaggccggacatggtggctcacgcctgtaatcccagcactttgggaggctgaggcgggtggatcatgaggtcaggaattcaagaccagcctggcaaacacggtgaaaccccatctctactaaaaatacaaaaattagctgggcatggtggcagacacctatagtcccaactactcaggaggctgaggcaagagaatcgcttaaacacgggaggaggaggttgcagtgagccgaaatcgggccactgtactccagcctgggcagcagagtgagactccatctcaaaaaaaaaaaaaaaaaaaaaaaaaagaaaagaaaaagaaagaaatatgccatctctaatgtcaaacatctacctatttttaattatttgggttttttcccctgtcatttttagcaacggggatattttgggattcatgtatgtgaatccgctgaatgaatgcttaggcagatgacaaacctgaggaactgtctgctccaacctgtaacacaaagatttccacctgataaattaagataagaagttacctaaccaactatattttgctgaaaagcaaaaaagccactgaaagctccgcaaactgtctacaagtcacagggtacccagtctagcacatacagggcttagtccccaaggctgagggcctggacctaggagaaaatagagcaggcagttccatgactatcatctaaaagtcaaaatgactagaaagaaaaaaaaatcacgacataaccagtgtctcaacagagaaatgatctttaagccatagggctggctacatggaaaagagaatacagcgtaatatcaaaacagctactgaatttagagcacaaggaaaataagaaaaaaaagcagatttttgaaaaatttcttctaaccatctaaaattcaaattgcagctatggctcaggtgaaaaaaacagtgctgcagtaaaacatcagcacctctacggagtaatcaggacggtattaacccccacctctctgaaaacaagaaaagccaggaggtaccattaaaagaacaggctaggccaagcacagtggctaacacctataatcaatctcaacacttcaggaggtcaaggtgaaaggattgcttcagcccaagagctggagaccagcctaggcaacataacaagactcgatctctacaatttttttttttaattggccaggcatggtggcattgagcctgtggtcccaggtacttgggaagttgaggtgggatgactgcttgagcctggaaggttggggctgcagtgagccgtgatcacgtcactgcactccagcctgggcaacacaaaaaccctgcctccaaaaaaaaaaaaagaccagtccagcccaggtggagtgctggctctgcacaaaatagctgtgcagaccttgggcaggcctccaagtctgttttcacaccataaaacaatgtagcagtatctaacagaagtttctgcgaaaattacatgagatcatatgagctgttcacttatcagcaccaattgcaaagcaaaggttaatgtttaagaggatgccagaaggaagaaaggataaagctcagtcttaagaattctactccagcacggctcagccttgacgctttgtatctggggccaggtcattctttgctgaggggcaaagctgccctgtgtactgcaggaatgtttagcagcaacactgccctctattcactagatgccagctgtactaccaccaacatggtaacaataaaaaacatgttcggccgggcatggtggatcatacctgtaatcccagcactttgggaggccgaggtgggtggatcacgagatcaggagttcaagaccagcctggccaatatggtgaaaccccgtctctactaaaaatacaaaaattagccgggcgcagtggcaggcacctgtaatcccagctacttgggaggcttaggcaggagaatcgcttgaacctgagcagcagtgatttcaatgagtcaagattgagccactgcactccaacctgggtgacagagtgagactctgtctcaaaaaaaaaaatgttcaaacattaccaaatggcgagatgcgggtacaaaatcaccccactattcctctactttttttatcattctttctgcagtttttacctatttttccttccccaaaatttgaaaaccaatttgttctctaacttgattcccaacttataatcttttccttcctctattcaaaataatttcttcctcctgatttgcctatttcagttaacagtagtgcctttttcccactcacccaggctcaaaatcttcctcgtttccaatggcctggtcctctccctatctcccaaattctctcctcctttccattctcaatgctcctgcccaaatgtatatcctcccccaacccccactacagcagcctcctctctggtctcccagcttcttgatccctctctcctctatgctatcccctaggccaccttagaaagtgtttctaaaatacaaatttcaagccgccactgtccttagcacagtccttggaacacagcatgcctctgcctacccttcccacctaggaggtccttccaccaggcatggtcagaagtactccctcccactttctcataaagtgcttgcatcccttctagcccacgctgactcccagtcaatactcgacaaaaagagtactaggcacattaagatgtgtaaatacattacgaaagacacggaaattacgatctcattgtggaaaactaaagataagggttgtgccccaccacgcagcagaacgaggagattccctgccactgacagagaatggagagatcctggaaggacgctagacaggctgacggggctccactggaggggaaaacaggaaggagaacgtgggcatcactgaaagcaatatatgacagataacagaagaagtgcttttattattattattatctaaattctactcctagctgggtgcagtggcacacacctgtagtcccagctaatgaggagggtgaggtgggatgatcgcttgagcccaggaattccaggctgcagttgagctatgatcccacaaatgcactccagactgggcaacaagagcaagaccctgtctcaaaaagaaagaaagaaaagaaataccactcaaccttctggtttccagtccagtatgtgtaagaagcttagaagtcgccacctgatcctaacaacatgtaaaaagctaaatcaactgaaaaatcaactcttaaagaaataaggtggctgggcgcagaggctcacgcctgtaatcccagcactttgggaggccaaggcgggaggatcacgaggtcaggagatcgagaccatcctggctaacacggtgaaactccgtctctactaaaaatacaaaaaattagcctggcgtggtggcgggcgcctgtagtcccagccacttgggaggctgaggcaagagaatggcgtgaacctgggaggcggagcttgcagtgagccaagatcatgccactgcactccagcctgggtgaccgcaaggctctgtctcaaaaaaaaagaaatgaggttaagggggaaactgctgcctcccaaattggacagacagaccggcagatacagagaatcacagtttactggagcaaaatcctccaccaaatcagcactagggtaggaaaaccttaactataactaacaaattgccggaggctcagtgtggacaactgtgagagtttaaaactccaggagacccaattactggggagccccattctttgacgagttttacctccaggagctctacgagttccttacagtgaaaactgagggggggaaaaaatcccttcatgcttccagcagagggaggggcaaagaaacctttccttttttcttttcctttttttttttttttttttttgagacagagtctcgctctgtcccccaggcaggagtgcagtggcgcgatctcggctcacagcaagctccacctcccgggttcacaccattctcctgcctcagcctcccgagtagctgggactacaggcgcccgccaccacactgggctaattttttgtatttttagtagagacggagtttcaccgtgttagccaggatggtctcgatctcctgacctcgtgatcctcccgcctcaggctcccaaagtgctgggattacaggcgtgagccaccgagcccggcctcttatatttttaaatacgacagaacattctgttcttaacaaggtctgccctcaggagaaattattttgccagtgtctaacctgttgggattttctcagagcctaaacttcctgagagagggcaaatacacaattccagccccctctggccattctgtcccacctaagcggggaggagaactaagaaaaatgggtaaagttcacagtctaggtgcacaggctcaccaaaagactgagacctcaccataggactataggttaaacattcaaaaatcaacaataggctggatgtggtggctcgtgcctgtagtccagcacctggggaggccaaggcaggtggaccacttgaggtcaggagttcaagaccagcctggccaacatggtgaaaccctgtctgtactgaaaatacaaaaattagctgaatgtgatggtgcacacctgtaatcccagctactcgggtgactgaggcatgagaattgcttgaatccagggagtagaggttgcagtgagccgaggtcacgccactgcactccagtgtgggtgacagagcgagactctgtctcaaaataaaaaataaaaaataaaatcaattaatataatctatcacatcaacaggctaaagaagaaaaatcacatgatcatatcaatagatggagaaaaactatctgacaaaatccaacacccactcatggtaaataataaactctcagaaaatgaggaatagagaggaacttcctcaacttgataaagaacatctataaaaaacctacagctaacattatacttgatgagaaagtcacagcttttctacgaagaacaggaacaaggtaacaatgttccccctcaccacttttttccaacatcataggaagtcctaactaataagaaaaggaaattaaaagtatacagattaggaagagagaaataaaactttgtagatgatatgattatctatgtagaaaatcagaaagaagtgaaaaaaaatttctggaataagagattatatagcaggactgcaagatacaaggttaatacataaaagtcaaccagtttcctacataccagtgacaaataagtggaatttgaaattaaaagcacattaccatttatatgagcacccccaaaaatgaaatacttatatataaatctaacaaaatgtgtattttgttatgtcactcaatgtgtattgagtcatgggtaggaagactcaatattatcaagatgtcggttcttcccaacttgatctgtagatttaatgcaatcccaatgaaaaccccagcaagttattttgtgaataccaacgaactgattctaaaatttacagggaagccaggcacagtggctcatgcttgtaatcccagcaatttgggaggccaaggtgggcagatcacttatggtcaggagttccgagaccagcctggcaaacatggtgaaaccctgtctctactaaaaatacaaaattagctgggcgtggtggcatgcacctataatcccagctactcgggaggctgaggcaggagaatcgcttgaatccaggaggcggaggttgcagtgagctgggatcacgccactgcactccagcctgggcaacagaatgagactccatctcaaaaaaaaaaaaaatgataataataataaagtttatcaggagaggcaaaaaacctagaatagccaatgaagaataaagtcagaggaccgacaatactcaacctcaagaatcattatgaagctacattaattaggccaggcgcggtggctcatgcctctaatcccagcactttgggaggccgagctgggcagattacctgaggtcaggagttcgagaccagcctggccaacatggtgaaaccctgtctctactaaaaatacaaaaattagctgggcgtggtggtgggcgcctgtaaccccagctactggggaagttgaggcaggaaaattgcttgaacctgggaggcagaggttgcagtgagccgagatcgtgccattgcactccagcctgggcaacaaaagccaaactccatctcaagaaaaaaaaaaaaaatgagccaggtatggtggtacacacctgtaatcccagctactcaggaggctgaggcatgagaatcacttgaacccgggagacagaggttgcagtgagccaagatcatgccattgtactccagccaagacactatctcaaaaaataaaaataaaaaagctacattaattaaaacagtgtggtattggcaaaagaaaggacaaatggatcaatggaacagactagagagtacagaaatacactcacatagtcaacagatctttcacaaaggagcaaaggcaatacaatgtaacaaatgtcttttacaacaaaccatttgttgtttcaacaaatggtcctggaacatgcccggagcggtagctcacacctgtaatcccagcactttgggaggctgaggcgggtggatcacttgaggtcaggagtttgagaccagcctgaccaacatgaagaaaccccgtctctactaaaaatacaaaattagccaggcgtggtgacgcatgcctgtaatcccagctactcaggaggctgaggcaggagaatcgcttgaacctgggaggtggaggttgcggtgagccgagatcacgccattgcattccagcctgggcaacaacagcaaaactccgtctcaaaaaaaaaaaaaaaaaaaaaaaaagtcctggaacaacgggacgtccacatgcaaaaaaaaatctagacagacgttacacttcccaaaaattaaatcaaaatggatcataaagctaaatataaaatgcaaaactagataatttcttgatggtaacatagaagaaaatctagatgaccttaggtatggtgattgcttttatttatttatttactttttttgagacggagtctcactcttgtcgcaacagtctggagtgcagtgccgcaatccaggctcactgcaacctccgcctcccgggttcaagcgattcttcctgccttagcctcctgagtagctggcattacaggtgcccacgactacaccagactaatttttttgtatttctagaagagacagagtttcaccatgttggccaggctggtctcaaactcctgacctcaggtgatccacccatcttgtcctccccaagtgctggaattacaggcataagccactgcgcccagccagattacttttagatacagcatcaaaagcatgatccatgaaagaaataattgataggccagacttcattaaaattaaaaactgctttgcaaaagatactgtcaagagaatgaaaagtcacaaacaaggaaaaaatatttgcaaaagacacatttgataaaggactgttaacaaaaatatataaagaactcttaaaactcaagaataggaaaacactttcccactcaagaaggtgtggcaggtgcctggcacggtggttcatgcctgtaatcccagcacttcgggaggccgaggcaggaggatcacgaggtcaggagatcaagaccatcctggctaacacagtgaaaccccatctctactaaaaatacaaaaaattagccgggcgtggtggcagccgcctgtagtcccagctactcgggaggctgaggcaggaaaatggcgtgaaaccgggagacggagcttgcagtgagccaagatcgcaccactgcactctagcctgggcaacagagcaagactccgtctcaaaaaaaaaaaaaaaaaaaaaaaaaaaaagaagctgtggcaggaaaaaaaaaaacaattaaattaaaattttaaaatgggcaagaagctctgtggcatgcccctatagtcccagatacttgggagactgaggcaggaggaccacatctgtgaatacccactacactcaagcctgagcaatgtagcaagacccagtttcttaaaaaaataaaaaggaaaaagaaaaagacacaaactgacatctcatcaaagaagatatacagatagcaaataagcatctgaaaagattttcatcatatgtcattagaaagttgcaaattaaaataagatacctgactgggcgcggtggttcacgcctgtaatcccagcactttgggaggccgaggtgggcagatcacgtgggtcaggagttccagaccagcctgtccaacacagtgaaacccacctctactaaaaatacaaaaaattagccgggcatggtggcaggcgcctgtaatcccagctactcaggaggctgaggcagagaactgcttgaacccgggaggcggaggttgcagtgagccaagatcacaccactgcgctccagcctgggcaaaagagcaagactctgtctcaaaacaaaaacaaaaaacagccaggcgcgatggctcatgcctgtaatcccagcactttgggaggccgaggcaggtggatcacctgaggttaggagttcaagaccagcctggccaacatggtgaaaccccatctctaaataccaaaaattagctaggcgtagtggcaggtgcctgtaatctcaagaactcaggaggcagagacaggagaatcgcttgaacccaggaagcggaggttgcagcaagccgagatcgcgccattgcactccagcctgggcaacaagagtgaaactctgtctcaaaaaaaaaaggaaagaaaaagaaaatgagagaccattatacgcctaccagaatgaccaaacaccagaatgctgacaccaccaaatgctagtaaggacatagaataacaggaaatctcattcactgctggtaggaatgcaaaatgttacagctactctggaagacagtttggcagttccttacaaaactaaacgtaactctcaccatatgaccagcaatcatgctcctaagtatttacccaaatgaattgaaaacctacacacaaatgtttagagcaactttattcataattgccaaaaccgtgaagtaacccagatgtccttcagtagatgaatggataaataaactgtggtatatccagatgacagaatactactgagtattaaaaagaagtgagttatcaagccatgaaaagacacagggaggctgggcacaggggctcacccctgtaattccaacaccttgggaggccaaggcaggcagatgacaaggtcaggagttcgagaccagcctggtcaatatggtgaaaccctgtctctactaaaaatacaaaaaattagccaggcggggtggcacatgcctgtaattccagctacttgggaggctgaggaaggagaattgcctgaacccggaaggcggaggttgcagtgagccaagatcgcaccattgcactccagcctcggcgacagagcgagactctgtctcgggaaaaaaaaaaaaaagaagaagaaaagacaagacaagacccagggaaactcagtgcatattatcaagtgaaaaaagccaaactgaaaagacttacatactgtgtgattccaattctatgacattctggaaaaggaaaacctatggagactgtaaaaagaccagtgattggctgggcttaggagggaaagagggataaacagacattaagtagaggatttctagggcagtgaaactattctgtatgacactacagatggtctccaacttatgatggttcaacttatgatttttcgactatacaatggtacaaaggtgatatgtattcggaagaaaccatacttcaagtaaacatacaaccattttatttttcattttcagtaatcaataaattacatgaaatatttaacactttattataaaaacagactttctgttagattactttgcccaactgtaagctaatgtgtaagtgttctggcaaattaaaggtaggctaggctaagatatgctgttcagtagattcaatgtattaaatgcatttcaatttatgatggtttatcagggcataaccctgttgaagtaagctcatcatgtaaagcagcatcaatacaatggtggatacatgtcattatacggtggccaaaaaccacagaatgtacaacagcaagaataggatgtagtgtgttatggactctgagtgataatatgtcaatgtaggttcctcagttgtaacaaatgtcccattctggtgggggaagttgagaaaggggaaggcagtgcctgtgtgcaggcagggggttatatgggaactctctgtactatctgctcaattttgctgtgaacctaaaactgctctaaaactgggcacagtggcacacacttgtaatcccagctactaaggtggctgaggcaggagggaccacttgagcccaggagttcaagaccagcctgggtaacacagtgaaatcccccatttctaaacaaacaaatacaagttgctctaaaaaatatagtgtattagtttaaaaaggaagaaagaaaaagaaagccagcaagccagccacccaaggaacaaaactttccagtaaaaacaaagtgtaaataaaattgtatcttgaaaaatgaaattgaaaattgtttctgttcttatatgtaacataatttaggttataatacaactacatatttatgtttaatttgaaaagcaaacgtttaaaatgaaaagtagggagtttgggcacaatttttccaaaaaaattatgatggcaccataagacacaattaacttcctatgtgagttttactgcattaattttacagtatctgaggacttggccagtcttttcatgggactctctccatcttttgatatgattctattttgcagggcccaaggtagcatcctcctcaatggttttcttttcactgttagtgggtctgtggaacgtaatgtcaaaagatgtgtgtgaaacttagtctccaacatttcattcattgaacttcatgaaatcttgtatccttcacaagattttaaacttcatttcacaactgctgtgaccttatcaatcagcaatgaaaataacaaactctaagctgggtgtggtggtttacgcctgtaatccctgctctttgggcggaggcaggcggatcacctgagcccaggagttctataccagcctgggcaccatggtaaaaccccgtggctaccaaaaaatacaaaaattagccaggtagccaggcgtggtggctcatgcctgtaatcccagcactatgggaggccaaagcaggcggatcatgaggtcaggagttcaagaccagcctggccaacatgtgaaaccttgtatctactaaagataccaaaaaaaaaaaatttagctggacatggcatgtgactgtaatcccagctactcgggaggccgaggcaggagaatcgcttgaacctgggaggcagaggttgcagtgagccgagatcgcgccattgtgctcccgcctgggcaacagagcaagactgtcttaaaaaaaaaaaaagaaagaaagaaagaaaatgctaataacatactattgatttgataggcagggacagaagttagtattaagttgtgatgtctggaaatgaacaaattttctaagtggtcagctcattaacaacaactctcatgttaggacaatttttatttttccctataccactcatagttgaagagactcagacaaggatctccgttcatcacacagcaaagaggccaacttaagctaaaaatgacaatttctacacttatccagttccggtgtgccaggcactatcctagtgctggagatacaaagatgaacgtgaaatgccctctaggaattcaatctaacaagagaatggaatgaataaacacacacacaaacgtgttaagggttgtgataacaaggcctgcatgtacaaagtgctaaggatgagacacagaggggaaagaaattcagtatgtctggttctctctgagttaagccttgaaagaggaattttaaaggaaacacaccaagggaaaggctgccaagcagagggtaggggcaaagaaaggcctggaaactgaaaacacaaagctcattcagaaaatgcaggctccagtgtaactagctcaatgttagttgctgtggttctggagaaggagtgattttaaaacagtaataacaaaaagaaccagtctaaaaagttaggccgggcagggtgcagtggctaacgcctgtaatcccagcactttgggaggccaaggagggtggaacacctgaggtcaggagttcgagaccagcctggtcaatatggtgaaaccctatctctaccaaaaatacaaaaattagccggatgtggtggtgcatctgtagtcccagctactcgggaggctgaggcacaagaatcgctcgaacccaggaggcagaagttgcagctagccgagatcacaccagcctgggtgacagagcaagactccatctcaaaaaataaatttaaaaataaaaaataaaaaggtaggccaaggctcaagtttagaccatgcaaacaagtttggattttattttccaatatttgagaaatccatagcaacaagatacagaatggattagaaggaacacacaaaatgcaagaagatcctaaggcacctcctgttctagtgtctaagcaaggacagcaaagggaccagacagaaggtggggatacaaaagtagctcatcaggtttgagttacaactgtgtgcagaggagggatttctgggggaatgcagagttagaaatgatcctggggctctggccaggctgctgctacaaacgcagagcgaaagcagaagcacattcctgggtggggaggagccaaagggttaaatttggaataggaatgcactgagttgaggtggtgaagtctcatcaactactgcagatgcactggcactcagtgaaacacggagctccagaaacggatcggggccaggtatggtggctcaggtctaaaatcctggcactttgggaggctgaagcggaaggactgcttgagctcaggagttcaagaccagcctgggcaacatggcgaaaccccatctctacaaaaatacaaaaattagccagtaatggtggtgcgtgcctgtagtcccagctacttgagaggctgaggtgggaggatcaccagagcctgggaagtcgaggctacagtgagctgtgatcacaccactgcactccagcctgcgcgacagagtgaaaccctgtctccaaaaaaaaaccaaaaaccagaatcagattgggaaatgtcagtaaaatttgatagctggagccataataactgcaactgcctatggagaatcactgaatttcaaccagacgaattcctctccttctccgcacctccaaatgcccttgtgtcttttttaaaagctagacatcacccactttcccatgtcctaaatcacctttttttctccttattaaacttattccataactacgttctctttcagaacacaggactgagagagtgtactcttgcaacattatgtaaaaaggtcatccaatccaaaaggaaagctgtgttttccaagactgctaactcctggagaaaagaaacaagacatcctcaatgctttcctaataactggtttgagcaaaatgcaaaagtttaactgctgagtgactctccctggagaaagccatgaaaatatcttaaggctggatctagggtgtccaaacattttcacaggccgcaggctagagcactggtgcaggagaaggggacaccagagacctggcagttcaggctttgaaggcagtaaacagccactgacctcaggcaagtcacttctcctttaggttttccatttcacagactgatgagtacatggcctaaaatgatcgcccttctagttgagaattttcaggcctaactaaaagtagattaaagtaaaccttggagagagctgaattttttttaagtgccattaagcaattcagggattatctaaacagcctcggttttcttttctctgcttccttaccaactgcctattaactctcactcttagctcataagcagtcagaggggctgaagcacaaagaggaagtgaagctcaaagagttaattttgctgcattagcggctctggtgaaagacagtgggcacagaaaaggaatcaaatgaccaaaactggacttggggattactggtggcagccagccagcaaatttctagatactgcacacaacctgtcagccaattaaaagaaaattggcagaaaatgacggaacacgttctttgtttttgtttttttgagacagtctctctctgtcaaaggctggagtgcagtggcgtgatctcggctcactgcaaccgccgcctcccaggttcaagcgattctcctgcctcagcctcccaagtagctgggactacaggtgtgcgccaccatgcccagctaatttttgtatttttagtagatatggggtttcaccatgttggccaggctggtctcgatctcccgacctcgtgacccgcccaccttggcctcccaaagtgctgggattacaggcgtgagccactgcgcccggcccgggaacacatctttaaaggtctcaatagaaggatgcacacactacgttgaatggttatgtcttcggagcagagtggtgaaagaaggtcagacttctgttaagtctgaatacctacacgcgtacttctgtaattcaaatttaagattaaatattttcaagtttaaaaaaaggaaaaaatggccgagcgcggtggctcatgcctgtaatcccaacattttgggaggtcgaagcgggtggatcacctgaggtcgggagttcaagatcagcctaacgaacatggagaaaccttgtctctactaaaaatacaaaattagccgggcgtggtggcgtgtgtctgtaatcccagctactcgggaggctgaggcaaggagaatcgcttgaacacgggaggccgtggttgcagtgagccgaggtcgcgccactgcactccagcctggggaccaagagcgaaactccgtctcaaaaaaaaaaaaaaaaggaaaaaacatttctaccttactcttattttaggagccacgcctcccacctttgtctagtaacacagctatagtgatgtctcttaggggatgagaaaatgctactcctccactaacaatgactcttggagagggaacaagacatcaaatcgcgaactcgaaaaactaacagaaaaaagttaaaaagtggtttgtgtttttaaagccagccacaacaccttcattcaaggccctaaaccgcagagactttctagacctatcttaagcgtcagtaccacacgcacttcgtgatggaacggtattgttctcctagaacagacccgttttctcatgaaaccgacgtttttacaaaagcctgtttgtggacggcctgcggcggccgcgaacccgcttcccttggattacccagggctgggagaaggagggctttcgccggctgcggtccccggtccccggcctccgccccggccccggctcccccggcccccgacccccccggcccacgccccctgcccggaccccgccccggccccgccccgcgtcacctgactgtcccgcggcccccagacccggcgccaccgacctgatgacactgatgtggaactcgtcctcgcggaggccccgccaggcgccgggcaggaactccttgcaccacagataggccctgcgccgcgtccggggctccggctgctcgtctgcgggcggctgcggcggcgggggctggggcagcggcagcggcagcggcagcggcggcggagggggcagcgcgagcggcggctgttggccgcccagctgcttggactcgaggtcgctggcggcgtcgcgctgctgccccacgccgggcgccggggccgcgctgccgctaccgcagctcagcagcagcccgagcggcgagggctccgcctcgcccccggtgcagaatttggttttcatgcccgacaggcggccgaggaggcgcgggcggccgcagcgcgagaggactaggctcagagtccggccgggcgccccctcgccgctctctcactggcaggccggcggggcagggggccgcggcggttgggcgcgcggggcggcggcggcggctgcggcgactgcggcgactgtggagcggggatgtgctgctggccgctgcactcgctcctctgccgccgccgcacgaggagcgccggccgcgtcacagcccgccctcgcgctcgccactgattggccgccgtccgccggcccggcgcatcataaccgccgccgccctcgccacaccgcctccccattggctgcggcgccgcccccaacccagagcgctgcggcctccgtgagcggggcctgggcgaagggggcggggcgtcgagggggcgccccggcggtcgcagggaagggggagaggggagcgaggcgcggggggcgccgggagagcgcctccgcggtgggacggagccggactgggccgagcgagggaggctcctgagcctcggaggaccccggggttggctttgggagctgaaagtttccttggacccctcggaagccccgtgacatcagaggccgggcctggcaggggcaggcaggaaacgtgtctggaggctactgccctctccgcgtgaccttgggcgagcagcctcctcctggggctcagtgggtgtgattttgtaacatttcccagcgctgccacaggcgcgtctcgccctgtccaacgcggagcccgaagaattactaagaaaccgaggtctgaaggagggaagaggtgacgggctcgaggccacacggtgggccaggctgggcccggctgcacgccggctaccggggcccagccctctgcacgcctcccgcagcctcagtttccctgtccgtggtactgaggatgctcgggcctagaagttcagggctggaggcccagggaccgtcgagggaggggcatcatccccgccatggggccgccgcaactgcccagagcacaggccaaaggtgcgtgccacggggctactggcgttgtggacgctgcccctgcctccccatcccccgcaggaaacagccttgtgaccgtgactaacgcacctttgccggggtagaggggcaagggcccctgctaccgtttgccacacactgccccatgtccctcactgctcccgtccttcctagaagtgaggtgctgatacatataaaaattatggatcccattttatgggacatgagctgaaacaggaggtttcctgggctgccaggggcttaggaaatccagtgcctgatacacaggaaatgcttctatgtggggagttcacagtcttccagaagcaaaaatgttttttggttttttttttgagacggagtcttgctcagtcgcccaggctggagtgcagtggcacgatctcggctcactgcaacctccgcctcccgggttcacgccattctgctgcctcagcctcccgagtagctaggactacagacgcccgccacgacgcctggctaattttttttttttttttttttttttttttgtatttttagtagagacggggtttcatcgtgttagccaggatggtctcgatctcctgacctcgtgatccgcccgcctcggcctcccaaagtgctgggattacaggagtgagccaccgcgcccggccgcaaaaatcttttagagtgtgtacttggctgaacttgctccacgcaaaatggtcttatttaaggataaaaatgaaaggggacttttgtaaggctgctgtggcgacaggcctggaagttgacctgcagggaggtaggagagaccaaggcccctgggacggaggccggccactggatgtttgaaaggctgagaagccaagggcttcaatctggggaggccgtttggataaaggagccaaggactttctctaaaaataccggctcacagggaggtggggccatgccaatggcctgcccaggtgacaagccctttgtcccactgtcccctggcaccagtctggtaatctcaaaggaatgccagaaatctggccaggaggaagggacactaaagtaaggagtggccctctataatttgaaataactctttctggcatctgctggcttttgttaggaaaagcctcagacatttttatgggatcacagttccctgtgggaggaagaggttgcctcaaggccaggcatggtggcttatggctgtaatcccagcactttgggaggccaaggcaggaggatcacttgagccaggagtttgagaccagcctggccaacataacaagactctgtctcgccgggcgaggtggctcatgcctgtaaccccagcactttgggaggccgaggtgggcggatcacaaggtcaggagttcgagaccattccggctaacacggtgaaaccccatctctactaaaaatacaaaaaaaattagccgggcgtaggtggtgcatgcctgtagtcccagctactcgggaggctgaggcaggagaatggcataaaacccaggaagcggaggttgcagtgagccgagatcgcgccactgcactacagactgggagacagagcgagactccgtctcaaaaaaaaaaaaagactgtctcaaaaattaaaaatgaaaaaaaaaattaacagagcattgtgtcttacacttgtccgactacttgggaggctcagccaggagcatcacttgagcctgggaggtcaaggcacccactgcactccagcctgagtgacagagtgagaccgtatttgctgaatgaatgaatcagtgagctcctggctcagcaattattaacttatgactttgggctgagcctcggtttcctcaactataaaatggggattataataccccgagcatccaggattgagagaatgtatgcaaaatgcatagcatgcaagaagtaaccgtttggttgcgtgcagtgcattgcatggcgttgcctctgccagtggttggttttcggagatgaataatgcatgcacttgtagcatttcacagcttgggaagacagtgtcgtataagaaaagaatttgggccgggtgtagtagcttatgcctgtaatcccagcactgtgggaggccaaggtgggaggtttgcttgaggccaggagttcaagatgagcctgggcaacaagtgagaccctgtctctacaaaaaataaaataattggccaggcacagtgacatgtgcctgtaatctcagttacttagaagccggaggtgggaggatcccttgaacccaggagttcaaggctgcagtgagccatgatcacgccactgctctccagcctgggcaacagaggctaggaaaataaaaatacattttaaacaaaaataattcaaacactctgataaccaaaatgtcaatgtctgtgcacaagtagacgagtttgagagaaacttgctatggcaggtaattggaggttgttccaattaccaaaccttttcctctaggataagataaaaaaattatccaaaagctctgtgattgatgctgaattctgagagcagactcagagggtgggtgatgggccttaggagggatagaggaaagattgggaagttcccgtccactctgaatttcctgctgatgggttcctcggggtccacccacgggcctcagccctgccaccaactccaaggcctgttctgagaaagggctttgtgagtctgactccccccaagatgggggaacccactgtcaagcacctggtaggagcaggctttgagccctttcaaagatgctgcatacagcaagttccctaagcagcagtgaggtgagtgtcattagcacttcatctcccaggtggcaagggagcttcccaggggataaaaccattcgttaaaggccagcaggacctgggactccacccaggaccccatccaggggagccttgtccttctgtccttctgcaccataagcacctttggcccaggaagcactagacatttggcacagtgggggttccctcacgggctggagaagcagagccctggcaaggctgtgctcacacctcctcccaggtcacacccaggaccaagcacccctgctccagttctgagccttaaaatattgatgagagcacagaggccacctggctgcaatcctccatgttgaagattgggttgcagtgccagctagcagagtgacatggagctgggctttccctgagtgctgagcgtggccccagcccagctctgtcagcgaaaggctgtgtaggtccagcagctttctggaggtctctgagcacaagtgtggtctgacttggactgacccttctaccatacatttggctcagcacccgcagccagagtctagggcccacagggctcagaggaagcaggtgactagaatatccatctgtctggtgggtggggcaggcattcctcctgtcctcatttgcagggattttgagtataatattatgggtaaaaattctggccaggtgcagtggctcacgcctgtaatcccaacactttgagaggccaaggtggatcacctgggtcaggagttcgagaccagcctggccaacacggtgaaaccccgtctctactaaaaatacaaaaattagccaggcatggtggcacatgtctatagttccagctactcgggaggctgaggaaggagaatcacttgaacctaggaggtggaggttgcagtgagccgagatcatgccactgcactccagtctgggcaataaaagcaagactccataacgcgcgcgcgcacacacacacacacacacacacacacacacacacacacaatctttagaggtcatgctgccacccactgtgtgaccttggacagaacatctacctttctaagccactttcctcatccccaaatggagtcctactctacagggctgttggggagattcaccgaaaccagcaaggaaagagctgggtgtagagccaaagccccacaaagggtatctatgcttttcagcttattgttagctggattcccagagcctggcagagagcagcaaatacccattcatcctaagtgccagtggaagcgcaaagcctgcaggagctctggcaggtctaacagggcctggagagttttccattctttgaagctcctggcacattcaaaaattaagaaaaatctaggcgggacacggtggctcacgcctgtaatcccagcactttgggaggctgaggtgggcagatcacctgaggtcaggagcaagactccatctctaaaaaaaaaaaaagaaacatctcgacagggttaccaaaactggggcatgtttgaaatacttaaattgaacaaatcagtgcttttaacacacatgcaaaagtcccattcaagataattttgcaattctcaaggtaatagagggattactttaaaataataatggagccaaccaagcatagtgacacctgcctgtggtccaagctactggggaagctgaggcaggaggatcacttgagcccaggggattgaggctgtagagacatgattgagccactgactccagcctgggtgacagagtgagatactgtcaataataataataataatggtttgtagagcaccttaagtggtatggtgtgacaaacatctttcaggcctgacaacagatctctgtactaatctgattatccttattcagatgtatctaaatctgaggcccttggggcacatgattgcctcctggggctgccatagtagaccctggcaatgacctagtgaccgttcctctactggagatgatcccctgggcccctcagaatgcatttcctgtgtccacatagccggtgttttaagtcaggtgatctttttttttttttttttttttttgagacgaggcctctctcgttgcccaggctggaatgcagtggtgcaatctcggctcactgaaacttcttcctcatgggttcaagtgactggcctgcctcagtctcccaagtagctgggattacaggtgtgcaccacaacgcccggctaattttggtatttttagtagagatggggttttgccatgttggccaggctagtctcgatatctgcccacctcagcttcccaaagtgctggaattacaggcatgagccaccgtcgccagtcttaagtcaggcaatctaagctccctttccaagtttgttgaaaacctgatttgaggttttgtgctttaagcttgcattacatttgtaacacaataaatgcaatttttggcacaataaatgcaaaattgtggcgcagtgactcatacgtgtaatcctagcactttgggaggccgaggcaggtggatcacctgaggtcaggagttcaagacaagcctggccaacagggcgaaaccctgtctctactaaaaatacaaaaattagctgggcatcgtggcaggtgtctataatcccagctatttaacaggctgaggcaggagaatcacttgaacctggagggcagaggttgcagtgagccaagattgcgccactttactccagcctgggcaaaagagccaaactctgtctccaaaaaacaaacaaacaaaatagaaaataaatacaatttttaaaaagaccccagtcatcatgcaggttacactgtggggataacacttctgggctaggagttgggcaacctgggttcaggcaccgcaccccctctgccggctgcacagggcccctctcccctcagtcagccctgggccctgcaggctggacttttgcctggtagctttgggctggccctcccttctgcaggggaccccttgtacagatgggtaagcagaggcacaggggcacaggcaggacagcggctctgctcacgcaggatgccatggccagtcgtgggcctactccatccttgatcctcccctcccaagggcacttgccatccaggcctgaatggcaagaggcccctaaggggcccccagtcctgtcggcaccccctttgagtgactgacagggaggcaggggagctggcagcccccatccccacaccagcttgtggaagctaccagcgatcggtggggccccactggcagcccgtccgtgtagccttggccgggcccccaagcttcttagaatgccatctaagaaggcagagggggatgagcggcggcggggaggaggggcaggccttgggaagatccactgggtcacagggaagcgaaggcggaccctcctcccccagcgctactgcccgggccgaattccaaggccagcggctgcccgctgagaaggaatccggaccaacgggattctggcttccctctggcccctcctggcgagagcggcgccgggaggagggggcctcagaaggggcgggcaggggcggggcccgcggggtaggcggagctcccaggaaaacagcgggcggggcctcgcgcgaggggcggggttggcggcgaggcgtcccaggacccccattcctccctccgccccggggcttctggggagcggcgcagcttgactgccaccgactgcgggcctccctgccctacaagcccccacccccgcccccccttgggacctggcgaggagttgccccgcaaagttggggctggtgcggggttaaggggattacaattttcctaggacttagtgtgctgaagctgcttttgcgattagaatttatatttacaatgctgataacaataaactacccaggctaccgcgccacgtggacgggggtggtggatggaaagggaaacccttggccaccagcagcctgtgataaggccaaggttccctggctggattgctgcctaggatgcctgtggtccctacccccgcccgggaggcaggattgactaatccgaccaagcaaggcctccaggctgggccaagaaccccttcccagtcctctcccaaagtctatgtccttgggctcacgctgtcctctcctgtccttgcctcctgcatctacagacccctgaggccccctcctccttcagagcatgcacgtcgcaaattctcaatgactgtttggaggaatgaataaatgaattgtgaacaaatggtctgaagattccagaggtagcctaatggggccctgctgcttgagttctaatcccagccccaccagttgttggctatttggccctgggcaggtgattattctctctttgcctctgtaccttgcccgtaaaatgaggagaataccagtacctactgcataaggttgttaaaggattaaatgagtgaatagttacaaagagcctggaacagagtgttcaaagaaacacacagccacagtattaaaaaaattaaaaacccatttctctccaggcttctgccatcactctgtgtgacttcaacattctacctgcatgacctatgcagcacctggccgctgttaccttgccaccctcactgacatcttctctgcataggccttccaccatgccctgtactttctccccactagaaatagccctggctctgaaatgtgttttaatcatcccactttgggtccaccagttcctagcctttgagcttaggcctctcctccaggaccctccctggctacgatttcccaacccctctcgaccttccattcactgaccttgccactttcttgcctcttgtctgcacctctccccatccctagtgtggattccatccccttgtgaacgctgccacccgtcctggcagagactcagtacttccactctctgaatgcatttcttcttcctaggcacaccagaagactacatttcctagccccccacccccttgcagtgtctgggaccatgtgactccttaattaggtcacttctctctcctgggaggccctctctgccctctctaagtctaactagtggcaaaggatctaagggaagaaacctggcagagttactagtcccaagaagcctgggtccctgaatcaccacatggaagtctacgcgcccaccacctgaatggactaaggtatgaacagaagtaatacacacccctttagggccaaggaggtgaaacagctggtatgccttcctcacactctcctctgctttcctggtgacctaggaagctgcaggatgaagacaacagcatcacaaggaggaagccaggatccctgtgttaccacaaggaggagagatgcctaaccaagaccgtctgcaaggattttgtgtgagccagaagcagagctgtatggtgttcagccactgagatttgagggctgtttgttacagcagttgacctatcctgactgacacatcacatcattcctttccccaccatgtgtctaacatgctaccaaattgaattttaagtaaattagtacttataaattaagtacaaatgcttttcaaattcacatgaatctttggtaaataaaactggttgtaaaattattgataaatatagaaatgtctgaaattattgataaaatagccttgtgcaagtaagactaatttaagatcattggttcaatgaaaataactgaatcttctgagttgtcggcaaaatgctcatgtgtttaagattcttagataggtgttcacttaatattcagactttaaaaatgattaaccaggatataactttgaccagcctagtatcatagtttttataagtaatcctgggccgggcacgatggctcatgcctgtaatcccagaactttggaaggccaaggtgggtggctcatgaggtcaggagatggagaccatcctggccaacatggtgaaactccatctctactaaaaaaacaaaaaattagccaggcgtggtggcacgtgcctgtagtcccagctactcgggaggctgaggcaggggaatcacttgaacctcggaggtggaggttacattgagccgagatcttgccactgcactccagcctgggtgacagagtgagactccatctcaaaaaaaaaaaaaaaaaaaaagaattgtggaatcctgctgggcatggtgactcatgcctgtaatcccacactttgggaggccaacgcaggtggatcacttgagatcaggaatttgagaccagcctggccaacatggtaaaacctcatctctacccaaagcacacaaaaaattagccaggcatggtggcagacacctgtaatcccagctactcgggaggctgaggcatgagaattgcttgaacctgggaggtggaagttgcagtgagccaagtttgcaccactgcactccagcctgggcaacacagcgagactccatgtcaaaaacaacaaacaaacgaacaaaaagaattgtggaatgctgctcatccataaaatgctaatatctaatgggcatttcaggatttcttgctttctagatttatataaaatgtgccaaagatgtgttcttattgagaaaaagaagaattttgtctaattcagaagttatctgcccagacgcagtggctcatgcctgtaaacccagcactttgggaggccaagttgggtggattacttcaggtcaggagttcaagaccagcctggccaacatggtgaaacacatctctactaaaaataccaaaaaaaaaaagttatctaaaagtcaattcaaattatggagttaaaagtggttcttggccagacgcagtggctcacacctgtaatcccagcactttgggaggccaaggcaggtggatcacctgaggtcaggagtttgagaccagcctgagcaacatggtgaaaccccatctctactaaaaatacaaaaattagctgggtgtggtggtgggcgcctgtaattccagctactcaggaggctgaggcaggagaatctcttgaactggggaggcagaggttgcagtgagctgagatcatgccattgcactccagcctgggcgacaagagtgaaactccatctcaaaaaaaaaaaaaaaaaaaggtccttaaacaaggttgaaagaaaccattaagtaggggagagagagatgtgaaaaaaattatggatacaaagatgtatttttggcaaagaagcttataaagaaaagacaatacctttatatgagaaaggatcttgtatggaaaattattgtcctagagtagaatgactggttatttaagaaagaggaaggccagatgtggtggctcacacctgtaatcccaaaactttgggaggctgaggcagggggatcatttgagctcaggagtttgagaccagcctggggaacatggtgaaacactgtctccccaaaaatataaaacttagctgggcatggcagcatgtgcctgtagtcccaggtactcgggaggctaaggtgggaagattgcttaagccgaggagattcaggctgcagtgagccaagattgtgccactgcatttcatcctgagcaacagaacaagaccctgtctttaaaaaaggaaagaaagaaggaaggaaagaaggaaggaaggaaggagagagagggagagagagaggaaggaaggaaggaaggagggagggagggagggatggagggagggagggagagagagagaaggaaggaaggaaaggaaggaaggaagacagagagaagctgggtgtggtggctcatgcctgtaatcccagcactttgggaggctgaggcgggtggatcacctgaggtcgggagttcgagaccagcctgaccaacatggagaaaccccgtctctactaaaaattcaaaattagctgggcatggtggcacagacctgtaatcccagctactagagaggctgaggcaggagaattgcttgaacctgggaggcggaggttgtggtgagctgagatcacaccattgcactccatcctgggcaacaagagcaaaactccatctcaaaaaaaaaaaaagaaagagaaaatgaagaaagagagaaatagtctaggacaagtcagaaagtccaagcaggacatagatggtttgtgtaagttgtgataagatttgtaaaggggaggccgggcgcggtggctcaggcctgtaatcccagcactttgggaggccgaggcgggcggatcacgaggtcaggagatggagaccatcccggctaaaacggtgaaaccctgtctctactaaaaatacaaaaaattagccgggcgtagtggcgggcgcctgtagtcccagctacttgggaggctgaggcaggagaatggcgtgaacccgggaggcggagcttgcagtgagccgagatcccgccactgcactccagcctgggcgacagagcgagactccgtctcaaaaaaaaaaaaaaaaaaaaaaagatttgtaaaggggaatttacaaaaacaggaattttgtttgtgattaagttagctgcgattaaaaggagattatttctcctttctaaggaatggtcccctatgttaaaagaaggtctgcttaaggtattgatttgctcttaatgaaattataagaaattttgcttttcaattttttgtttgttagttttgagatggagtctcgctctgtcgcccagactggagtgcggtggcgtgatctcagctcaccgcaagctccacctcccagggtcactccagcctgggcaacagagcgagactctgtctaaaaaaaaaaaaaaaaagggatgaatgagtgcctgtccacctccatttcatctggcctagcatatttaactgtctacacgtcttttgattctaagtctcttggccacagcggtcccacttagggacataatatagccagggcaggtagcacaccaccctggcatcgatatggggcacaataaaagcttggccatgatactgcctctggcataccatgaccagaaaaaaaaaaaaaaaaaaaaaaaaaaacacatgcacctgaaaatctagttgaggccatgacaggaagtgggtagggggagggagagtcagccaggcctcactatatttcctcgccttggaattccacacatattttccctgatggtaccaccaattataattcttcttgtcccccttggagggccttagtccctctacaaacaacagtgtctttctcaattcccataactgctccccataatactggtatcacattaaattactactttccccccatcccattcatgcttaaaccaaagcaccccttgaataacacaggtacttaacctttttttttttttttgagacacagtcttgctctgtctcccaggctggagtacagtggcgtgatcctcagcctcccaagtagctgggattacaggcatgtgccaccacacctggctaattttgtatttttagtagagacagggttttgccatgttggccaggctggtctcaaaactcctgacctccagtgatccgcctgccttggcctcccaaagtgctgggattacaggcgtgagccactgcgcccagcggtacttaaccttaacagctcccatcccattccagtctgtgacccacagtggatatctgtggctatatggatgcccactaaatcaatcagcctataaacaactcattcctcatttgagaccacgggtaccaatgtgttgataacatttggctcaaaggtcaacatatagtaagacaggtgaagccggccgggcgcggtggctcacgcctgtaatcccagcactttgagaggcctaggcgggcggatcacgaggtcaggagatcaagaccatcctggctaacatggtgaaaccctgtctctactaaaaatacaaaaatagagtcgggcgtggtggcaggcgcctgtagtcccagctactcgggaggttgagacaggagaatggcgtgaacccaggaggcggagcttgcagtgagccgagatcgtgccactgcactccagcctgggcgacacagcaagactctgtctcaaaacaaaaacaaaaacaaaaacaaaacaaaacaaaaaaaagacaggcgaagccttctaatatacaattatacaacatcacttgcccaagcactaagtgagcaattggccttctgttgtctggggtcagggctgctgtgggcttgttggccccatggggaggatttgcctaacatgaggcaactcttcaaaactttacttttcactctacataccttcttataaaatgggagatactttagataaattgagactctctcgattctatagcagatatagttatggataatagattggcattagactatttgttggctgaacaatgacaggtatatgctgtgattaataaaacctgctgtacctatgtaaacaactcaggtcaagtagaggaagataccgacaaaatatatgaacaaggctgggcacagtggctcacgtccagtgcttttggaggccaaggagggtgaatcacttgaggtcaggagttggagaccagcctggccaacatggtgaaaccccatctctaggaaaaatacaaaaattagccaggcatggaggcacatgtctgtaatcccagctactccggaggctgagggaggagaattgtgtgaacctgggaggcagaggctgcagtaggccaagattatgccactgcattccagcctgggagacagagtgggaccctgtctccaaaaaaaaaaagaaaaagaaaaaaaaaaaagggccaggcatgttggctcacgcctgtaatcccagcactttgggaggctgaggcgggtggatcacaaggtcaagagatcgaaatcatcctggccaacatggtgaaaccctgcctctactaaaaatacaaaaattagctgggtgtggtggtgcacacctgtagtctcagctactcaggaggctgaggcaggagaatcgcttgaagccaggaggtagaggttgcagtgagccaagattgcgccattgtactccagcctggcaacagagcaagactgcgtctcaaaaaaaaaaaaaaaaaaaaaaaaaaaaaagaacaagccaagtggctacatggtgttcacaaccccaatacccagactactatgcggaattccataaggggtttctaccggcagtgacttggtttttacctaggacctttaatagctctcttgttactattgatctttgtttggcctttacttatttaacctcttagtaaagttcgtgtcttctagattataacaattccatgtggaaatgatgcttgcactaggtttctgacccatcctgtcttctagcctggaaaataaagatctcctgcctttggggtccttagatcaggcaaccagagattttcactcctccaacaccaggcagagcctatgcccataagatcagcaggaagcagttgtagagggtggacctctgcccttctaccactttttaagattaaggaggagtctgacgcctgtcatcccagcactttgggaggccgaagcaggcggatcacctgaggtcaggagttggagagtagcctggccaacatggtgaagccccgtctctactcaaagtacaaaaaattatccatgcagtagtggcgtgcgcctttaatcccagctactcaggaggctgaggcagaggttgcagtgagccaacatggtgccactgcactccagcctgggtgagagagcaagactctgtccaaaaaaaaaaaaaaaaggtctggtgcgatggctcacgcctgtaatcccagcactttgggaggccgagacgggtggatcacgaggtcaggagatacagaccatcctggctaacacggtaaaaccccatctctactaaaaatacaaaaaaaattagccaggcatggtggtgggcgcctgtagtcccagctacttgggaggctgaggcaggacaaaggcatgaacctgggaggcggagcttgcagtgagctgagatcacgccactgcactccagcctgggcgacagagcgagactcgggctcaaaacaaaacaaaacaaaacaaagattgaagaggactctacagtctctccgggaaggaataaggttagagatcagcaggacttgttttctgagcaccagtcacaagaccttgctgaacaaaacatgatctgatcaaaagaggatgcaggaaagacattggccaaaactagctaaaaccaacacggtgaccaaagcaacctctagatgccctcattgttcattgtgcactaattataatgccttcgcatgctgaaagacactcccgccagcaccgtgacagtttacaaatactgtggccactcccagaagctaccttatacagtttaaaaagggtagaggcccagtgtggtgtttcacgcctgtaatcccagcactttgggaggcgggtggatcacgaggtcaggagatcgagaccatcctggctaacgtggtgaaaccccgtctctacgaaaaatacaaaaattagccgggcgtggtggcaggcacctgtagtcccagttacttaggaggctgaggcaggagaatcgcttgaacccgggaggcggaggtttccgtgagccgagatggcgccactgcactccagcctgggagacagagcaagactctgtctcaaattaaaaaaaaaaaaaaaaaagccaggctggctcacgcctgtaatcccagcactttgggaggccgaggtgggacagatcacctgaggtcaccctgaccaacatggtgaaactccgtctctactaaaatacaaaattagccaggcttggtggctcatcgcctgtgatcccagctactcgggaggctgaggcaggagaatcacttgaacccgggaggcggaggtttccatgagccaagatcatgccactgtactccagcctgggcaacaagagcgaaactccatctcaaaagaaagaaagaaagaatgaatgaatgaataaataaataaaataaaaattaaaaaaaggtagaaacccttgcttccagaaactccccactccttttgcagaaaactcgtgaatagcctgtcctttatttagcatataatgaaggaatagacataaatatagctggccagcaatccacgagggctgccgctactgctctacggagcagccattttcctgcactgttgctctaataaacttgtgtttgctttgctctgtcttgtttgctcacccttgaattcttttctctgcaaagccaagagctctcccagtctgagccccaatcatcaaagatgattttgagggcttcagtatttaaaggggaaaagcaggctggaggggaaggagggaggggatggtcacattattaaatccgtatgttggaagagaaaaggagcagggaggggaatagtgacatattcatctagtgcttctacatcggcattttacacaagataaggtgaatgcagagtgtagatatttaaccttttatccgtggctctctgcttaggaacaaaaggagaagcagcttcttgcctgactcagctttcagcttaatttttttcttttggcagagtgaattgggattccaagattttatttgcctttcccatcatgcgattggataccacaaagcagtgaagaacagtgagtgcccatgtacttgacaatgaaggggaatcttccagacatacatgaagcgaaggaaggcaggcaaaagagtgtgcttgtgtgatactgcctatttggggctctagaagaggcaaaactaatctatgggagtttgaggataatgttcaggataatggtttacttttggcaagtgttgtctgagaagaggcacttgggagccttctgggggctggaaatgttctgtatcttgagctaggtggtgggtacacaggcatatggcttgtcaaaaataattgagttagccgggcacagtagctcatgcctgtaatcctagcattttgggaggccaaggtgggtggatcacctgaggtcaggagtttaagaccagcctggccaacatggtgaaacccctgtctctactaaaaaaaatacataagattagctgagcatggtggtgggcacccgtaatcccagctactcgggagtctgaggcaggagaatcgcttgaacacgggaggcagagtttgcagagagccaagatcacgcaactgcactctagcctggaggacagagcaagattccatcttaaaaaaaaaaaaaaagaaggccaggagtggtggctcacacctgtaatcccagcactttgggaggccaaggtaggtggatcaccagaggttgggagttagagaccagcctgaccaacatggagaaaccctgtctctactaaaaatacaaaattagccgggcatggtggcacatgcctgtaatcccagctactcgggaggctgaggtaggagaatcgcttgaacccgggaggcagagtttgcggtgagccaagatcgcgcaattgcactccagcctgggtgacgagcgaaactccatctcaaaagaaaaaaaaaaagaaataaagacataaaagatacttggggctgggcacggtggctcatggctttaattccagcactttgggaagctgaggtggctagatcacttgaggtcaggagttcaagaccagcctggccagcatggtgaaaccctactaaaagtataaaaattagccaggaatgatggcaggcgctaatcccagctactcaggaggctgaggcaggagaatcgcttgaacctgggaagtgaaggttgcagtgaactatgattgcgccactgcactccagcctaagcgacaagagcgaaactctgtctcaaaaaaaaaaaaaaaaaaagttgagtcatgttgtgaatgtatttaacaccactgagccgtacacttaaaaatggtgaagatgttagattttatgttatatctattttaccaccatacaaaaaaattgagttataccttaaggtttgtggactttattacatgtcagttgcacttcaactgaaacatttagcacgatcgttgcccctggctcctgagtaatttttttcatttttcagacatgaggtctcgctctgtcgcccaggctggagtgcagtggcacaatcatagctcactgcagcctcgaactcctgggctcaagtgatattcccacatcagcctcccaagtagctgggatgtcaggcataataagctactgcgcccgtccccccaagtcattgcaaatgttctttgaaaataccaccttcaggccaggcgcagttgctcacgcctttaatcccagcactttgggaggccaaggcaggcagataacttgaggtcaggagttcaagaccagcctggccaacacggtgaaatcctgtctctactaaaaatacaaaaatgggctgggcatggtggtgcatgcctgtagtcccagctattcaggaggctgaagcaggagaattgcttgaacccgggaggtggaggttgcagtgagccgagattgcacccgcagcctggatgacaaagcaagactccatctgaaaaaaaaaaaaaaaaaagaaaataccaccttcagtggccacatattttcccatccacggatgtgtcctggtaccttcattcactctcaaatctttccccagaattgtgagaaccacagccccatgtcacagccccaaggttgcagacaaggtcccgacccacgttaagacgcaaaataatttattggaaggtttttcttagacccctgggaaggctaggaaacctggcttggaaagaaggaggagctcaaggaggcaggaagctgccccacagcctgggttaccccaggaataggctggtctaggggccgctgtaaccactgctgacactgtggatgtcaccatcagggacagtgccactctgggacgctgcagccatagccactgggaagaggtcccagtgggcccggattctttgtggaggaatctataggcctgagctctagaggctgggaaatggaggggcaagtctctggtccccatgctcaacaagaccccctcagtggggaattcctcattgcagaaggggcaccagatgcagggcagctaaacaagcagccagggattcctaccccgagaaatgtcctctaagacaataacagccagtatttgttgagctctcactgggtgccaggcccctgtgccaaacttcctacatggattatcacaaagaatactcacattagccctgtggggtgggggttattattatcttgattttgcagacaaggaggcaggcacagagcaatttggcaacctgcccaggaccacacgcatgaggagcaggaggcggcattgcattgggggcacctgtgtgccaggtcagtgcagggcactttgcagtcctcttagggctgagggccttggacactcagcaccattttccctgctctgtggctgcagggggctgcaggggctggaagcctgacagccacgtttccttgaagcccctgcagcagggttctgggttacagcctgtcagtcacgggcatttgcctgacacctggaaggctgtggggaggtgcagtggcaggcaggggtgggctttgccagatgtgacactttgccagtgacttctgggggtctcctggggctgaccagcccccctccgagtggtgcatgctcctgcaattcctccagtcctagtttcttttctttctttttcttaagacagggtctctttctgtcacccaggctggagtgcagtggtgcaatcatggctcattgcagccttgacctcccaggctcaagcagtcctcctgccccagcctcttgagtagctgggaccacaggcgtgcaccaccatgccaggctacaaatcctaacttctggaccaggtgtggctgcccctcagctctttggaaggttttgcaagcctcaaattccccgtgttcagtcctttcctgcttgaaatgccattttcccaactgaaccttgatgaggcagaggtgttaaggcaaagcagctgggcctataggcctgagctctagaggctggggaatggaggaacaaggctctggtccccgcgctcaacaagaccccctcaatggggaattccacattgcagaagggacaccaggtgtggggcagctcaacaagcagccagggcctcctaccccaagaaatgtccttctaggataatagccagcatttgccaagcactcaccggtgccaagcccctgtgccaagcactcaccgggtgccaggccccaggaggctgaggcaggactggctttagaacaggaaagctgggggtgcgagcccggctctgccagttctgtgggtttgtggttttttggtcgcttcatgtgcctgagtctcattttcctgtttcctcatttggaacaggcagtggtggcgtctctcatggggacgtggagataaaccagggcgacatcggggacacacaagcccagtgcctgcggcgatggccgatgaggcgctctttccatttcctggtagcagatgaggaaagtgaggctcaaagaggtgatgtcatttgccccaaatcacacagttgggaggtggtggggtgcgaattcaaacccaggagtgtgaagcttccagctcgtctgtttctccctggctgtgggtcagtgccctgtgggaggccaggatgccggtcagggactggcatggcagggtgaggggagcagggtgggccagcctgcctcccctccctctcctggggctgctgccctgtggagtaggggactgccatggccctcacctgtccaccttgtctccttgcctgggccttgtcagccctgtgcactccacagggcagggacagggcctgctgttgacagaagttcagaacaaggcagtgcttggccctgggtcctgcgcagatcagtgctggggctggcctggggcccgagctcaagcctccgaatccccttgcccaggctggactcttgctgcaccggggcaggttggcagaggcctggaggttttctctgggctgcaggttgaggcacctgggcttgcagacgcacgtctggcggtccagcttcctccctggcagcctctctcctgcgacagcaatatggtggtctgcagcttcaggccagctccattgctgcccatgaggctaccccagtggagagaggtcaccttgcctcagggtcccagctgaagtccccaggctgcatctcattggccaggcttggtgatatgttcatccctgaccagtcgcagtgcccggggggtgcgccctctcataggccagccatggagtaggctggggtcagaaaaggcctctcctccctgagccacatgaactgagaatggggaggtgacctttccaaagagggggtaatggactctaggagtcagaagtagtgaatgacccggacggggaaacgcaggccccactgtcgccagccctgctgatggtggccatcctttcttcctcaccttggcagcaggagctggatggagtctggggaggtggcaggtacaggctggagctcagagtgtgagagacagttgaggatggaatgttctcttggagaagcgagaataatgtctcctccccttctccaaacagcaagtgcccggcccagcctctgtctcaggaaactctctaacagccaagatcagggccttatggagagctgacccaaggccaggcactatgttggacacatctgatgagtcacttcacttcagccttgccaaagcttcatgagcacccatttcacagatgaagaaacggaggctcagaaagacaaacgtttcagccaataagtggctgaatctatgctcaaacctaggtctgtgtgatcccagaccctgaattctacaagtccaccaaaaactcctctttatcttcttttattttttatgtatttatttatttttagacagagtctcactctgtcgctcaggctggagtgcagtggcgcgatctcggctcctctccgccccatgggttcaagtgattctcttgcctcagcctccctagtagctgggactaaagacgcacgccaccacaccccgctaatttttgtatttttagtagagacggggtttcaccatgttggccaggaggtctcactctcctgacctcgtgatccacccacctcggcctctcaaagtgttgggaatacaggcgtgagccaccgcaccagcctatcttcttttaaaaacatcatcagtccaccctgggtaatatggcaaaatcccatctctacagaaaatacaaaaattacccaggcatggtggcacatgcctgtggtcccagcttcttgggaagctgaggtgggacgatcacctgagccctggaggttgaggctccaatgagccatggtcatgccactgcaccccagcctaggcaacagaatgagaccctgactcacgatacataaataactaaaaatagccaggcgggctgggcgcggtggctcatgcctgtaatcccagcactctgggaggccgaggcaggcagatcacgaggtcaggagatcgagaccaccctggctaacacggtgaaaccccgtctctactaaaaatacaaaaaaattagccaggcgtggtgacgggcgcctgtagtcccagccatttgggaggctgaggcaggagaatggcgtgaacccgggaggcagagcttgcagtgagccaagattgtaccactgcactccagcctgggcgacagagaaagactccgtctcaaaaaaaaaaaaaataaaataaaataaaataaaataaaaacacataaaacatcatcagtgtcttgttaaagtagtgctgttctagttgtaaacgagttagtgtgaggttgtgggccatgtctgaggcctcagctctcagcccaggaaataaggctgttgtgagtgagtaaggtgggggtgaaggatgtgggaggggggctctacttccaaagttgctgaggcagtgttgaaggccgcaggacacttcctcaccactgtggcccaactcttctttctccctcaaaacccagctcgaaggacacttcctcccagaagtcttctctgctgtgcctataaccctcccctgaccccaggaagacacacacacacacacacacacacacacaacttctctgtgtactccatcccctacgttgtactcatcaaagccccaaccatagtgtgtgtgtgtggtgtgtatggtgtgtatggtgtgtatggtgtgtgtgtgtgtgtgtgtgtgtgtgtgtgtgtctgtctgtctgtctcctcggtcagactgggacaacctgagggcaaggagagggaattccctgatgcccaaggtgtgccccgtgtagatcatggtacagagtggaggctcagcaaacagagcataaatgaatgagtgagtgaatgaatgcatggaatcttggggtgagtttccctgaagacagccccagggtgctgtggctgtaggagctggaccgtctagtgccttggtctgggggtggctgaagctggaggagggaaagaggccagtcctttgcagcttctggaggccagagtccaaggtcagcttctctcaacaggacccctctgaacccggctgacaccacggcctttggaagccatgtggtcagtaacacgctgtcacccttactgcagtctgttcacctgacctaatgactgggaacctcaggtctgtgactcaatgcccagaatgctgtctggtatgggggtatgggtcacacctggctcatctccaggacagccctgttctgcgtgtctgccagccaaggggtcacgtgctaacctggctgccccactgggggtgggaggggcagcttcaggatggggccgcatcaggccccatctccctaccaggcccgtcagtgggcaccctgagcctctctctctcattccttcttttgagcctgcagcactactccccgaccaaagcacactttcccttctcgtctggaggagagatggggcctcgtgccagctctgcccctgcctgacacacacgcttggcccgtcactgagcctcagtttccctctctgtatttcttggctgtgcaaaggcagtcgggggaggctggccctttaagctggatgaggctggtattttgtgtttttttttgagacgaagtctcactctgtcacccaggctggagtgcaatggcgcgatcttggctcactgcaacctccgcctcctgggttcaagtgattctcctgcctcagcctcccaagtagctgggattacaggtgcccaccaccacactcagcaaattttttgtatttttagtagagacggggttttgccatgttgggcaggctggtcttgaactcctgacctcaggtgatccgcccgccttgggaggctgggtttttgagctttgtgctgttggggcccagccctcagggccgcgtgggaacccccggggcggggtgttctataccaggaagtaggcagagggccagcccgaggacagttcgtttcttgccagtcccctgacctctcttggcacacagcctgtggcagcagcaggttgaagccagacgctgctcagacctcacaccacgtcgtttgcccaacccagagaaagctctgtccccggcttctggctccttctctgccaggactcactgggtgtgatgagttggtcttggggcactgtctgggcacagcctgtttgcccaacatggcctcctgggctccatgcttccgcaggtgggaggggtctggactggcccaggggctctgacagcggctggcaacctgaggttttgacttcagggtgacctgaatcctgccgcattatggaggctggagtctctgggggctgctttcccagagaagaagctccttccccatcagcctgacattggctccaaggactccatgtggctggagggctcagggctaaggggagggaagccccgggatggcagtgaggggtgagggaagatttgggaggtgacatctacaaagagacctgagcgggtggggcaaagagggggtcccaggcagagggagaagcaagtgcaaagaccttcataacccaggggagcgctgagaccaccgaccagcagcacccccacttcttcaagccaccactcctcagggcctcccaggggtccccagcctggagcaccccatgtggtagagctggtaggctgggggacactggggactgctgtcccacttggagcctcgggctactccgcccaggagcagcgatgtggaaccttgttggattttcatgttcccaaacatccaggagacacacagttgtgagtttccagccaggcgatctctaaggccagagcagcccttgtgggtgtcagtgaggaagggcagaaagactctggcctcaagctcagctccctgctgcagggagttgaacgcccctttggtgagtggctctagctaaacaaacacgtgttatcatctgtcaatagcggccacctccttgctggctgggctgctgctggctcaaagcccagagcagcccttccggggcactgcctgccacagccaacagtcagggaagggcagctactgccctgggttcaagcccgggctacccctgctcctgctcactgtgtgtccccaagcaagtcactgtccctgcctctctgtacagtgggaggcctggatctctctgctctgggaagacacccagccctggaatggttgggccacacttggggctgggggccaggaggaagttggagggctgggctggggctggggctgattagttgaagccagtagaaaagtacaggctttgctattagattccaggaaataacaaaagctgctaacagttaccgaatgcttaccacgcacccgacgtggtgctcacgcatcttttgctgttttatttcatccttagtgagttgggtactattatcatctccattttacagagcagaaactaaggctcagataggagacgctgcaaaatcaggaggtggtgaagacagaatgtgcccctagggtgctgatcagggccctcacctagaggcagatgcccccatctcctaaggtcaatggtcctcagctatcatcccttttttttgttttttgaggtggagtctcgctttgtcgcccaggctggagtacacgatctgggctcactgtaagctccgcctgccgggttcacaccattctcttgcctcagcctcctgaggagctgggactacaggcggccgccaccacgcctggcaaattttttgtatttttagtagagacagggtttcaccatgttagccaggatggtctcgatctcctacccgcctcagcctcccaaagtgctgggattataggcatgagccaccacgtccggccagctatcatccccttttaaactttctggactggccacgctgaacttctcaccctcctttccataagacaccctgtccttccatgtctccaggactttgcaggtgtccaccgcctctgccctttgggcttatgaactcctattcatctctcaggacccttcttaattttacctcctccatgaagcctgctttgcttggttccccagcagaaacagggggcactctccttggtcctcctgccacgcttcttccacacatgcatcctggcaattaccacattttactgatgttcgtgtgtgtttccctggagggaaaggagtgggtttcaatcacccccatatcccctgtgccttttgagtgaccagccgttattcggcactcaaatagggaaggctgtcaggggagcagctgactgcagagagactgccttggaaggaggagaggcccgggggtggagcggaggtttcgggtaaacagaggcggcctgactgacagaggggcatcagccaggggaaaatagaaccgggatccaggatcgtctgagtacgcagctgagctggagaaggttgtaatgaaggcagtttgagcaggtgtcagctgaggagggcagaggttaggggcagagcagggcgcatgaggtgtctggggtgcacccacagactgttgaggcaggacacgggtaccaactgacttgggtgccagacccatgtgaagggcacgatgggcactctcctgctgaatcctcaacaaacccagagcgctttcactccctctgctttacaagttacaaatctgaggtttgggaacaagtgaggcagggcaggtgccccccaaccttgccccaggccaagtgggtgcctgagtcaactctggtccacttggatgacagtcatgtgccaccacacctagctcagcctccccagcttgccgcttaccgcagaagaaaaacatggtttgactagcaagaggaggaaattagagttttgtgtatagaagagtcactctgggccgggcgcagtggctcacacctgtaatcccagcactttgagaggccaaggtgggtggatcacttgaggtcaggagtttgagaccagcctggccaacacggtgaaaccctttctctactaaaagcataaaaattagccgggtgtagtggcaggcgcctgtaattccagctactcgggaggttgaggcatgagaatcgcttgaacccaggaggtggaggttgcaatgagccaagatcgtgccactgcactccagcctgggcgacagagtgagactctgtctcaaaaaaaaaaaaaaaaaaaaaaaggaaaaagaagagtcactctggagaacagctaagtccaagactcctggcctgtagcttccagtcacgttctatcagtgctcaacttgccatccccactgaggctggtgtgatgaaatcaaaattacctgaccccggcctgctgctcagggagtaaccacactcatgaagagtggcaaaagtgtaacgtgctttgcagacgtgcttatgagatgtaaattgcctttcggtaaatagaaccctgcttcccattcatgtaattatagcttccagcctctgccccatgagagaaaacacttgtcctgaggggaatcacagtaataatttagagaataacacaagaaaccttctcctcatcaaatgcagttattcctttgccccggatgacatttctgtcaagtcgctattaaaatcaccaagtccaggctgggcatgctggctcacacctgtaatcccagaagtttgagaggccgaggtgggtggatcacttgaggtcacgagttcaagaccagcctagggaacatggtgagaccccggcccccacccccatctctactaaaaatacagaaaattagctgggtgtggtggtctgtgcctgtggtcccagctacttgggagactgaggtgggaggatcgcctgaacccaggaggtcgaggctgcagtgagccaagatttcaccactgcactccaatcttgggcaacaaagcaagaccttgtctcaaaaaaaaaaaaaaaagaaagaaagacaggaaaaacaaaacaaaacgaaaaaaacactaatcgtcaagtccagcagcctgcctggctggaggaaacctcggacttcctttgctgtctctaggcatgctccgctcccctccagtttgactcaccctttcagataacaagaggcctgcccccatggagtgcctgagggccagcaaacacctgtggcttcctaggagcccgtgctttgggcagtggcacctctcccacttttcaagctccctaagcatatttgacagtgggcgtggatcaccccacttatctggggcataatctttagacagacttctcctggccccacataactgcatggaaagtgggtagaaagcaatgattcctatttttcgcccatagggattcttttttttttttttttttttttgagacagagtctcgctctgtcaccaggctggagtgcagtggcgtgatctcggctcactggaacctccgcctcccaagttcaagcgattctcctgcctcagcctcccaagtagctgggactgcaggcgtgtgccaccacacctggctaattttttgtatttttagtagagacagggtttcaccgtgttagccagtttggtctcgatctcctgacctcatgatctgcctgcctcggcctcccaaagtgctgggattacaggcgtgagccaccgtgcccggccttttttttcttttaaagagatggatcggtcttgctatgttgcccaggctggactcctgggctcaagtgatcctccagcctcagcctcccaagtagacccacaggaatgccgaggagacagagactttcagaatcaccctggcaaaggtggggctgcgcagctggggctgggggtctctggaacactggcagctctgtggtccttacctgtgctctctagatatttgagatgagcctgggcaatatagggagaagcccgtttctacaaaaagtaaaaaaattagtggggcatggtggtgcgcacctgttgttccagctactcagcaggaggctgaggcaggaggattgctcaggtctgggaggtcaaggctacagtgaggcatggtcacaccaccgtactccagcccgggtgacagagtgaaaccctgtctcaaaaaaacaaaacaaaaacaaaaaacaagctggtgccttggagcctggggttaatgtctgcctctgtcacttgccaccagctgcacaatctcaggcaggccgatttccttgtttattaaggccccagagcaccaccaccctgagtggggtattccccgttcgtttccccacaggcccagtttctgtatggctccctgtatggagtgtggtagccccccaaggcatgttgctttgttccctgagccccagaagcctgcactcactggaagtccactggaggcccaccatgaaggttgtctgccatcctcttgggtgacccatgccatgatttctcacaactgtgaccactccactaccagggtcccgactaggaccttgttctcacaggaaagtgtggcccctccagagctctgagcgcctgttctccgcctgccctccacacttgcttactgctccaatgcttggcagtcctctgcccacagggagcctccaggattcaaacacctccaccttcacctgtctagtgacccactcagctcacagacttgccttttcttccctaacctgcaggtatgcacggcttctcatgcaaccccttctcctgccaacctgaaccctagggcccccagccctgctgtcttctgtggtctccacctgggtaaaggcccacgtgtgcctgagaggctcacacctgtgcagggaagtgctggccaccagcctgggctcaggacactgacctggtaccttgaaagtgatgagtagatatttctttaatgaatgataactaggtttctacagtcagcatgctttcccattctcaatttcaaacctccttcttactcctcaaacctcctggccctcctgtcttcactctcatctgcctcctacttaccagacaagagaaaacctcactctggactggctccctcaccacatcccaaatcctcttttcctcctggaaggaagacggatctactctctgaagacccccctgaggccctactccaagtaactccttcactttctttctcagaacacacttactatgcaagctccccgcctccaagattcaacttgggtctcctattaatgaaatgaacctcctcccttcccagtggtcatcctctctcgttcctccttcacaaactttgcctccaccctctcaacccatccggctcttccttgaagcactgacctaagctcagctctccgaagtcgaggaccaacagcgggggagcagcctttcctgccgcccccaggcctcagtgagggtgggtgcaggggctgccctcagccagctccctaggctagctcactgctgtggtctgagcatggccccaggttcatgctggaaactcagcccccagtgcaacagtgtgttgagaagtggggtctaagaggcaattcggtcatgaaggccctgcctcatgaatgaatggattaatgccattatcgtgggagtgggctcccaatagaagtcaagccccttcccctctctgcagcacgggacgatgcagcagaaaggtcttcctcgccagaatcggcccctccatcttgaacttcccagcctccagaaccatgaaccaaacaaacgtctattggttctaaattgcccagtctgtgatattgtgatagcagtacaaagagaccaagacacccactctcatggctttgattttaccccacattgaagattcaaatcttgttccctgctccaaaccccaagaacgtactaggtgctcaaacaacacggaagtgcaccttcactcctgccacactgggccccagctgctcagggcctcacactggttccagcggtctggtgtgcctgagcaggcccagcagcgctctgcctcccttcagccagagtagactcaacaaggtgggctgccccaaaaagacctaagtcactgtttactgcaagtcagctgaaaaccccacaaacctggcaaggaggacgcgggatctggcaacagatctggctttttcagaacattaccaaagcaatctctacgggcctgcgtctgtcttctgtcctccagattagcagctttacaacagtttccatgaatatgtgttaagcttaacggcctgggagaaaataagtggcagatggtggaggcagtgttagtgagcgaccccctttcccagtcttggccattcacacacactgcccctagcaatccctggtacccttttggaagaatccaaatttacttttcagccgggcatggtggctcatgcctgtaatcccagcactttgggaggctgagatgggcagatcacttgaggtcaggagttcaagaccagcctggccaacatggttaaactccatctctaccaaaaatacaaaaattaacccagcatggtggcgggcgcctgtagtcccagctacttgggaggctgatgcaggagaaccgcttgaacctgggaggtggaggttgcagtgagtcaagattgtgccactgcacttcagcctgggcaacagagtgagactccgtctctaaatcaataaatttccttttcccctgggctctatcattagcaaacacaagtaatgcccatgtgctctaggacatcagggagggagtaaacctcaccttcctttgcatgcgagggtcacacgtgccatagtcacagggagtgccctggagctggcaacttgcttgtactctgctctgggtgcgactgggttctgcagcagagtacgcaacggtgcagcaggtcagtgacagaaagttgacatttgagaaacgagtcacacaagggctcccggcaagttagctaccattggctattggaagagtagagagaaaacctgagatgctgaacaagactcctaagtacttaacagacatgccacgcttagcctttttctatactgggaacccaagtttgggtggatacttcaatcaattaggaaaaatcaataatcaatacttgactagtcccgtgtgtgcagcactcacccagattatcctcatgagtgaatgcagctcaaccagaaacttaactgatgacgggaccaggcgtccacactgatctccggcacagaatgatgctgggtgccaggaaagagatgtggagattaagcagcttgctcagggatactcagatgttgcaggtttcctctctcctgtacagtcatatttcaacagtaaatgggtgaaaaaaggacccaggccagtcatgagtatgctaactttgaccaatacggagaggggggaaaaaaacaactccaagtaatcaggaactattaatgcatttgggttgcaaaagccttcgatgttattgtgctccatgttgagggcaaacatttcttgggttcaaggactaggaaggtatgtagtttagtctccctactaaaagaagaatgtatgtttaccctctcttctcttaaaaatgagtggcaccagacacaagagaccagggcccagagaactcaacactcacaggtattgaaaagctttagaaattgattttacaaattgttttacatgaaaattttgtggagaaagtcaccactttgatcttttttttttcttttcagatacagtgaacaccggccaaattgttttaatttccgaatttattaaaatgattaacctcaatactgcaagtgcatgtacaaaatatttgtaaaaaatgtttttaatgaaacgttaaagaacttacctcaaatgctgaaaaagtcctttttcattctttcagtacaaggaatacattgtatctcaaaagtattacaactcagcaaaaacaatttataacagtaatttgaaaatgattgaaaattgaatactttacatatatttctatgatcatctcctaattcttacaatgccaaaatcttaaccaatcattgcataagctcaagctaagagttttattgaatgcaacctcttctaaactggtcaacggtgtgtggctgtcaccattccacacggtgaagttctacagcagatccggaacagttccgaggcccctacctttaccaacggaaattaggtttccctagaaggcatcaacagtggctgctgagtgcttgtgcataccgactcctgagaggcagtgatttactaccaaatgtcactgctttgagacccatgggaaggttggcctccaaagaggaggccatgataaaattaaaacatcaaaaataagttactaaaattcagctgaaaaatgaaaatgggaaatgtgttttgtcactttttaagatcgaaattcccaaaatagctatcgttggtattcaaataaggtttaagatttagtctctgaacctcttcaaaacaccccaaactaaggtgggaatacaagaggtgacccgctgccctccagcacctccagacacagggtctaccttcatcttcctcagtggcaggggttcacatttctatgcagggaccccatgagggctggacgtgctctgcaaagtgctccgggtgcctcggacaggtgctcctgagaggctgtgtgggctgccctacttcactgttgaagacctccagacgcagtgaacgggggtatgggtgggtgtggaagaaggtctaccacatgctttccaaacgcctgaggagttcgactgcaccacaacaaacaaggatgagactatgtaagactgcagaagtagttccttagagaaccaggagaaaacaatctactttctaaaaatgttcatgagtcttaatttctatttggaacctatgggcaatcaacagtcttaaggagcgtcattgaaacaatatccccccaaacctggaaactagtaggaatcaattagtagtaacagtaagcattgagattttctccactggacttttcatgaccttcagattccttttcatatttcaagacatgggctactttcctatagacactatacaaatcccctgaattgatttttacttaggaacactgtatatcagaaagtacaggtacacatttcccagaaataaagagacctactggtgtcaaacacctgttacagatttatattcccaaattctctgtccaatgatttgcaaaataatccagagaaatgaaaagaacctggtattgaacataaagtagtaataaaaatttgctcattaagttaattaaaattaatttctcaaagtgcttcaaaaaacaaattaaatctgactcctttttgtttaactgataatatagtcaaaaaaatctttgatgttttcataataaactaacataaactaacataagccaagaactcccactgatgcagtgcttaaaactatatatttataatttcctattttattggcatgaatatttctaaacttaaaaaccttcctggtaagttcttttaatttcttatgacaaaaatttctcacaacacacaaatatttacaacatatacattgttttcagttctttacattgaatctcaaagacaaactttttttataggttaccacagaacaaaagctgtgactcatgtttttatttcataaactattataagttaaagtgaatagatttttttaatattccttgtagcattttacaagtgcaacagaaaacttgaagaaccaaattaagatagctgtagttcattagataaatgttgcttgttgtcatcacgttgttcacagcaaatttttgaaaaaataagcaccaatcattcttgcaaagaacaattttatctaaaaggattgaaaagagttaaatacaaggtttttaatttacatgacaagcaataaatacgctgtatcgaacctcatcccacacactgctaccctcgtacatataatgaactgaaaagtgagctgtcacgtatgtcattttttttttttttttaagaaaccaatctgactcccaaccaatggtttgcgatattaacaaaggccacaaacagtacacctgggccagcaaacagtgtgaaactgacaaaactccaagggggaaacatctagcaaataaatcaaaaagccaaagatcattgctggtgatattagcatactagaaacccttaatatgctgctactatgatttgttttaaattattgtttagtcatatattaaagagccagctgatgctcttacagttaaaaaaactgtgtagccacattactgttttcaacgtcctgtgtggaaagttgctatcactgtacaattttgcttgagcctttattttacaacagggctttacctctaactcagaattgcacgtaagaaggctatttaaaaagtacgataaaaatttgcacaaatcagacttaagaattgagtcagtatgctgtacactttctacaatagtatgctgataagtgaagggacaatagaagtgctgccactaaactttcagttgaggaataattgactggaattttttatttctttaaagtagttatcccaggtcaagttaagaccaagagcttaggcattaagccttaaagactgatcttctcttctccttgaagaaatgtcaatatctatagagtcttttccaactattaacctcaagcgcttagctggaggaagaggaataaaatcgtcttcaaagtcatcatcatagtcatcctcctcttcatcgccctcagaagaggaggaatcatctgtactttcttcctcatactgactatagtcatccacctccattcgagactccaagagagaaagaggatcactgcagcacaccccattttcatgaagcccctctgtataagaccccctattttcctcatctcgttttagctggatttttaattttgtagaactactgcctgatcctgagttaaatccattattaagctttgctacatagagattgttatcgttgtcatggtctttgcttaacttgatgcttattttggaagagttcattccatcattctcttggtcatttgttttgctgctgctatcatgacgcctacgaagagtcaatttgggaatcccagagttattttctaggattaactgtgcatcataccttgtgattcgcctcttctttttactttttgcagttctaaagctgtcttttgttttgaagctatctgatgtcacaactgaacaaccgacgggtgaaggagcacagtctgtgtagctcacaggcacgcccacagtgccactgtgctcaccctggtcagaatggggacccatcaaatctggtaccgcgtcgtcttttccaggagaatcgtgcactggagtagattcctctatttttgcaaactgtttcacaagttttccttgtcgtgacttctttttggacatgcctgtgtcactcttatgacactttgcctcccctttttgtgcagtctcatgagccagttcttcctcctgcagcacaggagctggctgcagctgttcaccactgtcggggcaaggttccgtcacactgcttttatagccattcaacgtatttggttcaagcttgatgtcagaggcctccttcagatttgttcttgtcctcactgaccgccgagttatgtaggtgcagggcgagctctccccctgcgaatgagcacctctcacaggattctgtctgtgttctctcgccgcgtgtctagtcaagcacccgctggcaactgcggcttgggctggtccctctggctccttatcttttttaatgggcaaatttttatacagaactactttaggctctttcagtactaagtttcccatttcgagttttcttgaagcattcttttgctccagccgcttgcaatgatttctcaattttatctttgaaagtaaaggctttgcaggcttcttcagtttctttggtaccctggaattatttatatgagttagcttagatgaggtagagttggaagaagctggaattcttgacatagattgcctcgttaacgttctgctcttgctattcttttttacgccaactgaagattttcggttagaagctgtaaggttaaagagaaaaaggtgaaaagccttggtaacagcagagttcaagaaaagaatgcccaaacccaggctattagctacagcacgtttagattacacaaacgccaacaccacggctcctgctgcagattctgccagcgcacctgcattccctacactgcttctctttgaagttcttttctaatttatggggcatctattcatttttgaggtaagtagttgcacggttaaggagcttttcacagcagggacctagattccactctaagcttcttaatctgtcgtgacactggcccaaacgaacgctttcttctcctgatttagtagtttcccacataaaagatttcaaagaaagttaacatggttttttcctttcacagattctccttagtcatttaaaatgtttctaaaatccattgctcattaacctaaaggaagtacagcacttggccattaacatagagtagaaatagaatactcatgggctctaaggaacaaattctatcgcaatggtttcaaacaagaaaaacagatgctaagaaccatatattatcactctgaaaagtacagtcactaccgaaaaagaaatgcactattctaagttgtccccttcaactccgtgaggaacagaagaggcaaccagtgggctgtcaacttagaagagctgcaaagcttactcagccccatcccttcagtgacggccagatgccaacaatcacagtgaaggaagatgcacgctgctagaattgtacactctcaggacaaagggagatccaacttctttcctccaaggccaggatagaaaagggttacaatgaccctaatggtaatgacaacctgagtagtgatgaatatgattccatttgagaatgagcgtattcttatccactggaattatacagaactactaggtagaaaatattttttaaaatataaggatatttagataattcttttgctacagaatttctttatgcttacgaggcttgcctacaaggtggatcgaatagacgtgctgtcaatataaagaataaagttgaatggcttctcaaaaggcttcatttgtgactcaagcttaagctgctcctgtagtgtctctgaccttgccactgactttctgctatgttaatttttcctctgtattgacattccagactattatttatagaagttgttacacaagtcagtttctcaattacttagttcttgcaggtccagttgaaaaacttcttcctaatcaaaacactccatttacagattcactagagaagccacgataacaaaacgaatcatcaccacctctcatcagaacagggaggataaaaacaataaaacatgggtaagctcagcacactgcccaaccaagtgaggaccaggatcctgcagagaaatctgtcgctttctacatgcctcaggttgccagggcaactgccattccttccgcccagctaagcaagtaagttaccataagttcagtttttattgagagaggagcaagaatgcatcacaacattccaaaaatatcaaaccaccaagaatagaaggctctgcacctgaggtcaggagttcgagaccaacctggccaatatggtgaaaccctgtctctactaaaaatacaaaaattagtcgggcacggtggtacgtgcctgtaatcccagctactggggaggctgaggcaggagaatcacttgaacctgggaggcagagtttgcagtgagccaaaatcgcacgattgtactccagcctgggtgacaagagtgaaacttcctctcagaaaaacaaaaacaaagaaggtcctgcacgcacagactggctcataaatggcttcagggtacataaaccagcagaattcacagcaaagggattcacagtttgaaacaagaacatacttacacatgtgggctgctaccaaggtggcgcctctttttagaatagtaggagtagtgaactttgaatgtgattcaatttgagaacgagtgatttattatccactggaactatacagaactatgtgatagcaaatttttttttaataagaaatttagaaaataagaaaaaatagggaactcttcggctaaagggtttctttatgcttgcctacaaggtggactgaatggacgtgctgccaatataaagacactagtgaagaaaggactgcactgcttggcttccctttgcttggctctctcagatgtggctacgatgatcctttgctcattctatgcctcctcaaggactaatttatgaccaaacttagtggtttccaacctttgatttctcctctttccattccactctcatgacgtacctgcaagcacccttacacaacactcacatctatgtcatattctcaacagcaatccccgccatctggatccagcctgctcctccaatgagacagcctttggtgatctgacaacttcttgtcgtcaaacccagcacacactcctcagcccttccctttcttcatttctctgaatgtgacactgataaccactttttcttgagaaaacctttcttctcttggctgtcaaagagagcgcactctcctggttcccttctccatccctggcaccctccttcatcggccccttagactgttcttcttcaggtctgtgtagtcctaggccccaggtgacaagcacccattctcgcacggctattaccacttacaggctgacagttcccgaactctggccagacccgctcctaacttacagaaccaggtcaccaaatactgactgtctctaagcccctaaatggaactcaccatcaagtctcctgacgacgtcccctttcgaggtctccatcttggtcaatatcaccaccacatgcccagctgccaaagcagaaagctggaggtcctccttgactcctgctctcctgaactgcctcaccaagccaatcaccatgtgccgtggagtccacccctgcaatgtcactgcaacctgtctactcttccctgtctcgaaagccacagcctcctgcatgaactatggcagttttgtttttcctattgttttcccaacaatccgtttaccaccacatagccaggatgactttcctagtgtatcatgcagcttctgggctttaaacctttcagcaacctaatgccctaagaatgaagtctagaattttaacctgtgctcacatctcttcttcttagcctgtactcgccatgaagaaaagctttgactcaaactcccctctgtctatagagctgtctgaaaggccctctgctttgaataggcttcacttggccaacttctcatccccctgtaagactcagcttaggcaacacctccctgagggagcctctcgggactttctctgcaatgcctttcctatgtcttctcacagcacccaagaagctccttccttggtacttcttattttcacccgttggatgactcccattttatggtgattctgaattcggctctccccatcccatccctccttccaaaacattcactgttgacaacagaaaaccaaagcacttttatgtgtttgtctctaaactaacataaacgctccatttttgagcacaaaatgggtatgtatttgatgctatgtattacatcaacacagagatttcacttacatgttaccaatgtattctaattttgtttgaaaagcattatctcatcaaaagccctgtcaaaaggtatgctcatcaaatcaaaggaaaaaaaagacaggcaaagaatttgagaaatgtgacaaagatgaggacccagtagagtgacaagagtccttcactgtccaaagaagctgcactgtcctggcaggggttgagaatttcagacagtgaaggctaaaggaggaagacagtggccacaatgacaaactaaaagtcaatgattttaaagtccatcaagaaaccaaggactatgacctaagtggggtcagatgcacctgtgtttgagcttgctgtggcacttatatgcctcgtatgactcttcccctaggggctgggacaaatctcaaatacatggacctggactgtaattttaggtgggggtacacattcttctcagcaattactacatgctaggtgctgtgcaaaatggccacattcatcctaatgaacgccgttggaagggaaagcgattaaagctatgtgaaaaccaagcttacacgaactagcatgcctaaggtcatccagctggtgaatggcagagatgggacttgttaggccttcctgagcattaaaatcacgcttatgctgcctataaggcatatacagaagaattatggtgttggcctcaacttacgggtaaaggccccactgcatggctattatggtcatttcagggtgtcctcaaaatcataaggcagggtggcacaagacttccagtcagacaaaagagctgtgaccgacaccaaagccttcctgagcactcaggccgcactggaaatgcacaatcagcgtgaactaagataatacaagggccacagctgagcatctccagagctggaggatccagaaggcctctgacaggactttaaagacctcggtctcaaggagtttacttggcacaagcagctttcatctgacatgactagcacagactgccaatggctacctggaacggggtgttagaatttggaagcagcccgaaggctcagcagaaaagtgttcagatcaactcttgacatgagtgacagggcaggagtgaggagcagcgccccagcctctgcatctaggacaggtgctccatagttaagatcaacttctccctctggccgattcttctggggcttgtcctgacttgtggcacctgcagagacccgtgtccgcatcttcacagaccgctcgcgagcctctctctggtctcaccttccctatcacagcactaacttcagagggggcagcccagtcagcgaggcataagaggcctgaaaaaccagaatcctccagtcctggcattctaattcagacctgtggactggatttgtgaaaacggattccttgttgtctctacttctggatgctaaagcaaagtcacaccatagctctcaaggtactttccgaaaaagcacctgtatggaaatttttcttccaactactcagaacatttttttatacatgtgttcaaagaaagcagttcctctgtcagctgctaaattctaaacgaaccacatgataaagatgagcagccacacagaaaaagcactccgcaaacacatacacagcacatgcacccaccaccctgggaggagggactggcagtgctggctttcctgcaggatgtggcttccagaacctttctttcagacaggtggaggggatggctgagacaaacaccaaaagaaatacagcctaagagaacgcatgtaagaactcaagaaatccttatgtgaacatgacttaacatacaatggtctcagagacaactaaagccttgagctccttcagagagagcactgagccatgcctatccactctgcccatgacctcagagttagtcatactgatccttggattgctccaatcatgctgcagaaagggaatttgaataagccaagcaccccaatatcagcagtccctgcaaaatgtacacctttcttctgtaatgctgagacttcagcttaaagcgattattcagtccctctgaacttgaaagcctgtgcctccagtttgttctgcttacttgtgcacctgtcttatcctggagctaagtaaggcataagctccctgaggaaagggcccaagtctcaaacatctttgtatgtcttcaagaactagcaggatttcagtaagtatttagtttgttaatatatattcccaaatatttggtttaataaatattaatagttaaatattagtacacccaacatcttccaaaaattatttgtattcttatcttttaaactaagtagtatattgagttcagtagctatacaccagtaataaagttactacttaagcataaaacacctacatcacatagccattcaacataggcaactctgtggctgtctccatatacagatggcagcacgaacctaagtgtttttgtttaaaaatcacaggtctctggccgggtgcagtggctcacacctataatcccagcactttgggaggccaaggcaaggcggatcacctgaggtcaggagattgagaccatcctggacaacatggtgaaaccccgtctctactaaaaatacaaaaattagctggatgcggtggcacgtgcctgtaatcccagctacttgggaggctgaggcaggagaatcgcttgaacttgggaggcagaggctgcagtgagctgagagtgtgccactgcactccagcctggggacagagcgagactccgtctcaaaagaaaaaaaaaaaaagacacaggtcttactatgttgcccaggcaggtctcaaaactcctaggctcaagtgaccctcccacctcagcctcccatgtagctggggctacaggtgtgccaccatgcctggcttttaagtgtttttatgtctgcatttataaaatgggcttcacaagtctccagtttcaccaaggaaccagactcagaaaacaaatggtcgttatgctgcatttattatgagaatcaacagtcaacagttaatgattgactaactcttgttgttcactctggacattaacgaaaaagactggaatagggctacagcgctgcttttatgctacacgggttatgcttggactctgactcccagcagcaggtagattcaggaattcatggcagtgacattcaccatcatgggaaacaccttcccttttcttcaggattctctgtagtggaagagagcacccagtgttgggctgaaaacatctgaaagtagggagaagaacctaaaataatcagtatctcagagggctctaaggtgccaagaagtctcactggacatttaagtgccaacaaaggcatactttcggaatcgccaagtcaaaactttctaacttctgtctctctcagagacaagtgagactcaagagtctactgctttagtggcaactacagaaaactggtgttacccagaaaaacaggagcaattagaaatggttccaatatttcaaagctccgcaaacaggatgtgctttcctttgcccatttagggtttcttctctttcctttctctttgtttagtcttcgttctctttttcagtttccatcagatcttgcccccacacaccactggaatctcagaggttgcttctttctcctttccatctttactcctactttctggagtagccaatacagcatgtcacaatacggcactgttcaaaatgctcctctatcacaattctgagtctggtactggtggtctgctgaactgagtcagttcgttttgaaaaaggtcagcaagcaatgaaaaggtggaagccttaaggccagaagctatgaattccccaagtccatcatcttttctaacaaactggctaggcactggaatgtatagagtctaatttaattctactcagtccttttgtcttcttgcaggacttagcgacatcatcacagtctctaacaccttgaaaatgtttaaaacatatgatgaccttggaacatatgatgaagaactcatatccagttaccaaggtattcaagaaaaatagtctagaggacggtactgaagttagagatgggatacagactgtgcctctactcaaatcacgtctagagccttgaagtgcagccaaagctcacaagtcccagtctctctgagtatttaaaagtttaaaactactgaagcacactttataaagcaaattgtgtgaaaatacttttaaaagatatgcttatcaaatctcccttacttacttgcattgtttttttcctgagtggtatctgcatcagtgttagagctgacagattgactgtctgaatttttgctgctgtcacctaactttttaagcctatttaaacgtttatctgtttctctgagtccatatttgctattgataacaggagcaggcgcaggcagtcccactctggatttaaaagcaccagtgccccgtctgaaagagaaaatagcacaggttaaacaaatagaacacactttcttataataagcttaactgctgagggtacttggctacaggttaacagatgtgatgagctgctgaggccttaatcaccactggaaaccgaagactagaactcacaaaggaaattaagtatctatattataaaattaactttaaatctatatttaaaataataaaacaacttgttatgactattatcaatcattaattgcctatgagaaactactggaccttgtaaaattttttccttttttttttttttttgagacagggtctcactctaccgcccaggctggaatgcagtggcacgatcatggctcactgcagcctcaacctcttaggctcaagaagtcgtcccacctcagcatcctgagtatctgggaccataagcgtgtagcaccaccaccagctaatttttaaatttttttttgtagagatggggtctcactatgttgcccaggctggtctccaactgctgggctcaagggatcttcccagctgggtctcccaaagtgctggatttacaggcgtgagccacaaagtccagccctttaataaacattgccagattactttgccaaagggatagagcaaatcatggtcccactagcatggtgtgagttcctgcttctccacatcctcatcaacggtacattgtactccttaaattttaccaaagtgggccaggcatggtggctcacacctgtaatcccagcacgttgggaggctgaggtgggcagatcacgaggtcaagagataaagagaccatcctggtgaacatggtgaaaccctgtctctactaaaaatacaaaaaaaaattagcccggcgtgatggcaggcgcctgtagtcccagctactcgggaggctgaggcagaagaattgcgtgaacctggaaggtgaaggttgcagtgagttgagatcgaaacttacacagagcaagactccgtctaaaaaaattttactttttgccaaagtgatgagtgaaaatgaatacctaatcttgttttaatctcatttatggccatttttttcctgtgaagcatctctgcatctctttttcctttaccttttttcctatttgactatgtcttttccctataagcttataggagctttttgttattagaattttttttttttttttgagacacagtcttgctgtgtcacccaagctggagtgcagtggtgcgatcttggctcactgcaacccctgcctcctgggtgcaagcgattctcctgcttcagcctcctgagtagctggaattataggcgcgcaccaccacatctggctaatttttgtatttttagtagagacggggttttgccatgttggccaggctggtctcgaactcctgacctcaggtgatccacctgcctcagcctcccaaagtgctgggattataggcgtgagtcacacgtgcgtggcctttgctttaaattttctagagtaaaatgtgcagtacttatgaacatattacaattactactgtcagtacagtgtagcagagaaacatgcttcaaatgtatcctggagtgtctagcgcgactcagtgtctctgcacacgtgattccgtccattctcacttcttcacggagcctcttccttttaccctctggctctcagcacagtgtgtgtgtccccttcactgaactgccctgacagctggcactgtgctggtcttgtttatcctgcatgcacttggcctaacattaagtaactgttcagttaatatgtaatgaataatggaatgagctcctagatgcatcttcccagctaatttctgtaaaggcagaaacaatttggtgtttatgagaacttcaagaatatatgcagccaatcttgaaatcaaactgctcaaacagtctgacaatagccatggccactattctccatcatgctgttccatttaaaaaggacttacacacgtttctatctacttctcacactaaccttgtggagtaggtgggattatcctcattttcaccagtgagaaaacagaggctcatgaaagagaactaatctgctcaaggaaaatgactatacctgcagttctaaaccagggaaagagctgtttcggtgttggtttggaatcctcagtatgtggttaggtgttttcaggaccgcctccaaaaacttcattatatatatttactctattcattcatttaccaaatatttatcaaggacttactatgcaccagggtactgttctgtattctggggatatagcggaaaatgaaacagatacaagcccctgccttcatggagctcatattctaatgggaaaataaccagaaaccaattattgtagttaacatttgtgtattaactgtgtgctattctacatgctttacaggaaataacaaatttagccttcacatcaaccctacaaaataggttctgatgttatccccattttacagatggggaaattaaggcacaaagcagctaagtgacttaccctacacatcacatagctaatgaaatgcagagttgcaggattccaacccaggcagtctgatttcagatgataggcacttaactgttatactgtttcctctacaaaatgattttgaagaattattgaactataattaaactactttaaagggtattctctggactggtccaagatctaaccaacatgtgaataatttttatgtagaaaaagataaattttatgtccctctgccctggtaaaaattcagcagcactaggaactggttttctgccacatctttatggcaaggagcccactcagtgctgggagagggatggctacggtagcactgtgacttgatgactccgtcctctctcaccacacagttggaaatccctggctatccagaaaggagggaaatggcaactggggtatctgcccactgcaacctctaggctggctatttgtaggtgttttaaagtgggagaagtgacactaataactctgatcataactccaaaagcaatatgaagtggaaagaatgaggactctgaagttaggctgactggggtctgatacttatgttctggtactcgcaatgtgggcacctcctagctctctcatgaatatctgtgagaactgaacaaggtggtgtgagtaaagtgcctggcacagtgcaagatgtgcaaaatggactccaggtttccttctctgtggcctgtgtggtctgtactgcctttgaggggactcttcctgcagcccttgcctgcctgagcctgtgacgctcccttcatggtgctctcacacacagaagtcactataatgagcaatatgaactggtggtcctgccaatgaagatctgggggatttctgtaaagactccaggactcttgatgagacataagaagaggttccttattgaatgactgatatcagggaacaactcttaagaactgtgaaaccaaaattccagaagacacagcttgataatatgcaagacgactatcagtggtgaactccacttgacattttgagtagcggcaaccccattctggcattgcgtgtgtgcatgtgtgtgagctattaaccattctctccttaagcacatctgtattctggcccactcttagctggtaatattaagattttaaagggaaattttaaatttattgagggacattccaatgtccctaaatagctgtgcagcatttgactttgttcatacacactgcaccagccgctatgctaaagaacataaagactatctctgcatttaaacaacaaagagataatgtgagtttaatccccataatcaggttgttaacaaaaaatgtttaggctgaacattttacttaataccttacctttcgcaagtgtaacactcgcagaactcattattttctccaaagaacccatctccataataacaagaaatttcttctccaggttcaatgtctcttagagccttcacacatgctgtatctcgaccagttgacacaaactaaaataaaagtaactcagtaagaaactcacacctgaagcaaaaacaaaatacttgaagaaaatttttttaatgcttaccttacaattaggtctgcaatctgaaaaatgtccaaaagataaagtcaattaactgttgataagatctgaaacacgaacaattatagaaatctgaaataagctttccatataactttacaacttttgataggagtttaggtctcaagttcaactaaaggaatatacatttattttaataagtttgtggaaacatttctatttcaaattctcctttaaaggaagataaaggtttgactgaggttgacaaggccattctagcagttagcaggaatggccaacactagcgccaacaccttggaaacacagcttaccatggtttataaacgcagcaggacccagccagagttgagcacagtttttccttgtggagtacatgacactgaagtcgttttctccatgtctaagtagcatgttctcctcaatttctgaaagttcggcaatacaacccaccagtaattctattttgtcatttcgtttcctatttaaaatatgtgatgtgttaaaaattactagtaattaaatatagtaaggcttcttttaataaaataatcctgacaataaatatcagaaactgaaaaggcctagctgtctatactttagttagctcactgggatccccacctggctatcttctctcctaccctggagctccacagccttgtgccatggttacttgtgtacctatcttattcctgcaagagaatggaaactcaaccaggacagggactatgccacctatgtctctgaatgccctggtgtggtgttttgcaagcagaaagtactcaaatacttgcggcaatgaattaaactttctgactgctggatgaagcaggcagggaccagtggcagtaagggttatgaggatccggaatcatggtgccactctttagagcacaccatctgctaggaatataatgcaagccaaattttcaatcttaaattttttagcagccacattgagaaagttaagtgaatataggtgaaattactttaacaatttattttattttattttatttgagacggaatctcgctctgttgcccaggctggagtgcagtggcgtgatctcagctcactgcaacctctgcctcctgagttcaagtgattctcctgcctcagcctaagtagctgggactacaggtgtgtgccaccacacctagctcattttttttttttgtatttttactagagatggagtttcaccgtgttggccaggatggtctcgatttcttgacgtcatgatccgcccacctcagcctcccaaagtgctgggattacagatgagccaccatgcccagccaacaatatattttaacccaatatccaaaatacgatttcagtaggtaatataagaactatgaatgggaataaaatttaatatgaaatctggtgtgtatagcacacttacagcgcttctcaattcagactagctacatttcaaggactcaagggctggtggctactgtaccggacggtacagctctaggactctagatctcaaacctacacacccatctgcaacacagggagccacataatccaactagcaggctcaatacatcctgaggtaaatgaagcacatttcatgtacacacactcaccccagaggcctggcaataaagttcttttacctatccattttcagatatctgaccccccaaatttttgtggtagaaatatcagagggtgggtacatgaggagctacatgtttttcctgggagataacatagggaacaggcatgataggaaagaagatacagtagtatattctctttcatctgtaacttttatcccttttagctgggctcaactctgacttaattttgagatagagtctcactctattgcccaggctggagtgcagtggcgcgatctcagctcactatagcctctgtctcctgggttcaagtgattctcctgcctcagccacccgagtagctaggactacaggtgtgtgctaccacgcccagctaatttttgtatttttagtagagatggggtttcaccatgttggccaggctggtcttgaactcctgacctcaagtgatctgcctgcctcggcctcccaaagtgctgggattataggcgtgagccaatgccccccaccaactctactatttttattgaagctggcatatatacatatatatatatctgtatgtatgtatttttaagcaactaatgctttagggaggtttccacccataaaactaggatcattaaaactttagccccaacctttcttctaggccagtagaagactgactgtggaagccaggttatctaatcacggtatccacaactcttcagcaatcatatcactgaacaggcatccagagtcaataaaggaaaatgaaaagcaatttggcctagagatgggatctggttcaactgagacttccgatttccccactctgactccagctgatgggccaaggcaacggcgatgcattggctacttcagggtaaactctggcttcattccttaccatgaatttctcagcacttcaacaataatttagaagagaactttaaattaaattaaaggcttatactagtagaatagttaccactcttttgttgcaactattttggctccattttgttctgatgagtatctattacatggcaatatttcaaatccactgtcagttgcaaacattcgcaaataaataaatacctaaaacaggaaaaaaaaattgataatgactttaaatggtataccctgctagactttcttacaattataaaagcaaaccacccgcaatgatgaaaaaaatgtaagatctagcctgagcaacatagcgagaccctgtctctacgaaaaacattagccaagcatgatggcatgtacctttagtgccagctacgtgggaggctgagaggaagaatcacttgagcccaagagatggaagctgcagtgagccataatcaggccactgcactccagcctgggtgacagagcaagattctgcctctaaaaaaacaataaaataaacaaaaaaagtaagatcattaggtaacaaactttattgttactcaagagttttgaatgtcacaatttttctcattttgcaatatttgcattacagtaactagctgaacacctctaaacaaaaaattcaaaatcctcccatgagcatttcctttgagtgtcaggtcggtgttcaaaaagtttcagattttggagcatttcaaattttggggttaagggtactcactctgtatgagtacctaatggcttgtttcccttaaggctcataatgaatttcacctctatatgacaaagttttctctccttttttggttttagagacagggtcttgctctgtctcccagggctggagcgcagtggcatgatcatagctcagagcagcctctaactcttgggcacaagcaatgcttctggctctgcttcctgagtagccggaactacaaactacaaaggtacacactactatgcctagctaatttttttattcttatttttttagagatggagtcttgctatgttgcccaggctggtctcgaagtcctggcctcaagcaatactcccatcttagcccccacaaagtgctgggattacaagcatgagccactgagcctggcccagttttttctctggactgtcatccaaatgactgtatgtgttacaagatcttcagactgattagttttatgaaaaataaatttaaaatttcagtattaactaacatttagggttttaatttacttcactattcttatccaaataggttaacagcatcagtcttaataaacttacatgttctttgaataatttctcctgcattttattcttgttgagaaaatagtgccgtgcccattcgcctgaagtcaaacatttgaaggctttctccaagtgttcatctttcttaaaacgttcaattacttcctttagttcttcctgccttcctttaataggcctaaatctgaaagaaatcaaaagaatgaatgggttatctgccacaatccttgcgccactgatccatcttaacagatcttgagaaagagctaataccctaaaaacagccatggttatcagagcaaagatctaagagaagagaacaacaatcaatagtcttgattactactattcaagtaatactgatcacctggatacgcaagttctcttttttcaatctgttattttaatatttttatttcactgttatctcagtaacttctcttttttcaatctgttattttaattatttttatttcactgttatctcattaactgtgaggtgagcagacgattcaaacaaaagctgtctgattcagacttacactagtcgtcaactttgggagacacaaaatcaaagctctagaatacagcacacctaatttagagttagaatgacaagaatctttttaaaacatgcaaaatcaagctggaagagtgccaggcaatgaatttcagaagtatgatgatgtaaacaaaaccatgccatacacaaaaacattctttatgtacacagtcagaaaaaaccccaaactaagtattccaacaggcttcgaaacacaccttgatgttctaaccacccatgtcaaagtcatctttgatgactgcattcagagaacaaaacgagtacaagcagtgttaactctagtggtgaaattgctatactggtaatgtaggaaaactgatggggtagagttgttttttttttttttttttgagatggagtctcactctgtggcccaggctggagtgcagtggtgtgatcttggctcactgcaacctctgcctcccgggttcaagtgattctcttgcctcagcctcccatgtagctgggatgacaggcgtgcgccaccatgcccagctaatttttgtatttttagtagagaccatgttggccaggctggtcttgaactcctaacctcaagtggtctgcccaccttggcctcccaaagtgctgggattataggtgtgagccactgcgcctggcctgcaggggtagaattgaaaaggcttccattgtagaatcagccacactgatgtcttcagaatattatcccattaggtctgtatttatgcatgatgcagtcatggcccaagcaagacaaatttgtgaacccctcattctaaagctgtgttttcagtaaaacgtgtactataaagttactagcatcttaatttcaaattttcttttcatgtcaatttcataaagctaattctcccaaataaagtttttattttaaaaaaaagttttattttattttcataaagctaattctaaccggattatggcccggtatggtggctctcacctataatcccagcactttgggaggtcgaggcggatggatcacgaggtcaggagatcgagaccatcctggccaacctggtgaaaccccgtctctaaaatgcaaaaaattagccaggcccacgtagtggtacacgcctgtagtcctaggtactcaggaggctgaggcaggggaattgcttgaactcgagagttgaagttggagtgagccaagatcgcgtcactgcacttcagcctggtgacagagcaagactctgtatcaaaaaaacaaaacaaaacgtccaacagaaaaaaggaatcaccgattgccattcaaataaaatacattaagaaaaaatattagtggttcaggagaaaaaaatctttatgtgtcttactctgacatttaaaattgtacatttcataaacctgaatatgctaaaattgaggtaagatctagcacaaactccagcaaaggaagcattcagcagaattttttttcctagagaagctatcatatatgtattcatagtatttcagtaagatttcaagccacagtatttcatcaaggattattaggtgctgtgttgtgtatacagtggcatatgaagtgctatggtgaaaaatacaagagaagacatggccactgttcttgaatggaaaatttaattgggactaaaagacatatatatgcatcaaacagttaagcaagtgatcaatatgcaaatgcatgttaatatgctaaaaactgcattgctatagcacctaaaagtatagaaattataactagggtgcaaaatgtacatgggaaaggtttaagaaaagcacattataagcaggtaagaatcaaaaggaaggaagaatgaggggaagtctaagcagaagatcttaatcaagctggattcaaagagttgaccagggtcagctaggtagcaataataaagtaaagtaccagaatcaggaagaggaaagacatgaggtcctgaacaggtataatactgtttactggacaggatcactggaagacttcaggtgtattaatgcatactgatactaccaggaacttactagctacacactctagtcattttttttttaattcagtaatcctgaattctcacaactattagctgaaccatctgaaagttcaaacatatcctagagataatactgaagaaatgaacagggccctattttccattttcaatcaattggtatacaagcctttacagacagataaatgcaagtcctttaaacaattcagaacgtcttactagtctgtcgacatatggtgtcagagaaccaccatgaaaataaagagctgtagaattgggaaagcatccaaatatccatactcaactacttgtagccatcacaattgattgtgtcaagataccatctccaagaaatccaatggaaaccattcttgctgcaatcctacactacatggttatttgcacatgaaggacagataagacaacaaagcagctctcagctaaggcatgacctgtcgagcaatatgaaatatgaaatatgaaatggtgggaaacagataacccgtgctttgtgtggcaatcagaaaagcaatagttcactttaagcaaatgcaataaattatccatgccgttaaatgacagggctacaaacgacagaaagggccaagctatctttacacgttcaatgtgaaagtgaccaatgggaacattatacaaaagtaagttatagacctggaatgaaacttggctatttttaataggctttatgtgtgttctatgctttctgaaacaagttcattcctatctaaaaatgccttcaggtaaccttggttttgtttactttttattcataatgccaaacaatttacatgctaaaaccaacacaaaatagtcaactcttgatttagtagtattctgcctaccttccctgtgttgacttctgtttctgctttcctgactttattgcctcaaacataaataaaacccctgaaactatcccttgctaccaatagcaagaacctctatttcactaaaaatataagttgctgtcccaaacctgttaaaacttactgtcacagttggctgctatgggcatgaaatgacagtaaggaaaagggggaagaaaatggttaagggtgcagacaggcaggagatgagacagttgttttcaataatcctacagaagtatgtaaaagtcagctggctgatagtccaaatcaaatcccattgtaacaaatactgtggaaaataaaagttaagactgttatacctattagggctggtgcaaatgcactgaaaaccttagggaaatttttttttttcctattattgaacagaaaaataccctctctccttaactataatcactctaaatctcccatacaaactgcataaaactatccttttactctgacacttaaaggccagataatttagaacagcccttttgttccacaaatgaggaaaataaggcccaacaaggctgagtagattgccaatgacttagggttaatgaatggaagacctgggatttaccctggcctttctggttcctgttatatcacctggctcaggagagccttcctcacattgtttcatggttagaagaggatttgacttgcgtttgccattgaacatcagcactgggcccagccagagacagctctagcttgtatactgacaatacagtggaagggatggacgcaaatgtgaattttaaaatttcgtatttgggtgggggggtgggtgacaagggaggcaagaaaaacagttatttggcatttccaaaccaatatgccccgtcctccctcccttaatagaaaatttgctactttaaatcaaccaaacatatctattttttctctttttacacttccaatcaatggctggtataagaaaaataaaaatgtcatttacaattgattattattaaaggggcaggaaaaaaacatatgaattcacactcccacacacctgttccccactctttccagagactcacttcccaggttttcttgctatttggtttttctgtctccccactgtggcagtgaagaaaagttgtagactgtattagctgtgctactgtgcccttcattagcatgcacaatcaagagctgactggaggggtggggaacaggaaggggaacagaaaaaagggagacagggaaggagagaggaagagagaaaaatgctcaaatatttaagatataaaataaaaccatgaggcaacatagtgaacacatttccccctctgaagaaagtttagctgcaaatccacagtttgtagacgctgagtgaggagtcgcagatcagctcttcagtccttcttgacctgaaaataaacgagaaccaaaaacatacctggctgagtcctgcaatcagtgctcagctaatcacatggagtgactcctgatcttttgaagaatgatttgtttctcttaaaatcaccctgttatgaagtacaagtggttttttaaaaaatacaactattatcaaactactttaaaaggtttgtaaaatgttctaaaactctaatttatgctgacacttcaaattacttaacataaaagaacattttaaaaggctagaatgggttagtcagtatctcattgtttttaacacacactacctacctcacagggttgttgtgagaaaaactgtcagattttgaaaaatgccttgagctcctcgaaggaaaggcgctatataaatgcaaaaacaaacaacaaaaataaaaagctatttgtataatctgtacttgtaatttctaaacagacttacaatattcgttgttgcaaaaatctttaaaactctgtgataatcaagaactttaagataccacaggtgggcgcggcaggatagaagccatgctgctgaaattctctgcttcccatagaa

SEQ ID NO: 2 - DNA, 192918 bp, Homo sapiens
attcacagaagcagagtagaatgatggttgccagggtggggaagtgggcagatgccaaaggacacagaatgtcatttttagagaagaagaataagttcaggatatccatgggacaacatggtacctatagttaataacgacatatcatacacttggaaatcactaagagagcagatttttaaatgttctcaccacaaaaaaataagtctgggaggtgatatgttatttagcttgatttagccatttcataatgtatacatacttcaatcacatcatgttgtataccctcttgtacgtaatttttgtcaattcaacaactccaaaaaacaagacattctctttacaaaaataattattaaaaataaaattcagaattctattttatttatttatttatttttgaaacagagtctcgctctgtcacccaggccggctgaagtgcagtggtgcgatctcggctgactgcaacctctgtctcccaggttcaaacgattctcctgcctcagtctcccaagtagctgggattacaggtgtgtgcaatcacacctggctaatttctgtatttttggtagagacagttttgccatgttggccaggctggtctcgaactcctgaccttaggtgatccaccagcctcggcctcccaaagtgctgggattacaggtgtgagccactgcacctggacagaatataaaagattctttaattcaactaaaacattaaaacatagattatttctataagtggtaattgttctaacatgttttggtcaaaatagtctccttacccatccacaattaaatggttaattgacatttgattggatattgataaagttttcaaatcatgattgacttttccaatgtacagtaaaatgtgcgtgaaaatatttcataaaaattaatatttaaaaatggtcaggcacggtggcttatgcctataatcccgcactttggaggccaaggtgggccgatcacttgaggtcaggagtttgagaccagcctggccaaacctcatctctactaaaagtacaaaaattagtcaggtatggtggcatgtacctgcattcccagctacttgggaggctgaggcaggagaatcccttgaacctgggaggtgggttccccaggcttagagcaaaacccccatcttgtctgtctccactctcatcccaggcaatcacagtcatttccacagcctcaaccactgtctacctgggatgcctcccaagcctgagtctccagcccaaacctgccttcctagccccagacccatcagtcctggcacacattgccccctgggtcccaagcaacctcagccagtgagtccaacgtcaacttcctgtccttgcctgacactgccagccctgagatcagacttgaccattcacctccagtacctgataggtccatcagtgctttggaacatatctcacaaacattccccaaaccaggcaccagactccacacatcaacaccgtcatgtgagtcaccagcatccctggcagggacccctgtcccagcctccaactcatctccttcctgtcccttgagttctgtgtcacattccagaggccacaagaagaaaaatgaccaccttaatgaaattaaaagaattgagaagacatttccctatggtccaaagtctttccaactgagaaacacatatcaagatccagcctgccagccctgcggttaaatgttcctgaaataattaaagcccagggtgacacagcccccactccacaagtactcccagcacaataagacttgcttctctgcaggggcttgaaatgtccagtgtgtaccttgcccctctctgtcatagctaacaggaatgtgctccgtgtcttcttcctgctcaaaggactgtccaccaacctgcgcaggcagcactttcggccgggagggacgagaggacttcccaccatttcccacttacgcactgcattcctcaggagcctgcctcacaaattacaagagcgccacagcagacacaccacattccagcgggtggccatgtcttcatgtcagcttgaaagatcatcaccagggaaatatctatatctcagcagagagagcttcagcctgtgtagtccagctgtgctcaaatggaaatccagaaacccagatgttggtccaaacaccctgtcttggagagccggctctgcaggtccccagcgtgggagtgaactgggtgggccacctgccctgcctgcccacatccctgcctcctggaatcctggaccctgagaaccagagggatgtggtggggaacaggcaagtcttgtgcagaaagccaagatgccacccaaatccactctgcagtctaggtgggtgatattctggtctgcaccgtaccagcgcatgaggggatggaggatggagtctagacaagccaaatgtaaaaagatattgcccaagtattttgtgctttgtctgtgttacaatgctatgcccagcccagcgtggtggctcacacctgtgatctcagcacattgggaggccgaggcaggcggatcaccttaggtcaggagtttgagaccagcctggccaatgtggtgaaaccccatctctactaaaaatacaaaaattagccaggtgtggtggtgggcacctgtaatcccacctactcgggaggctgaggcaggagaatcacttgagcccaggaggtggaggttgcagtgagcagagatcatgccactgcactccagcctgggcaacagagtaagactctgtcttaaaaaaaataaaataaataaattctatgcccagcattttccatgtactgtcttattatctcagtaaatcccatataaccttcctatgaaagtgtatctcatttatctccattttatagatgagaaaactgaggcccctggagtagtattaattttccaagaccgcattgctcataaagggtacagcagggacccaagcttgacactctcaccctcaaacatttccacaagtgtagaccaatggctgtcaactggggtggttttgctcaagtactactcccttgctccatgatatttgaaaccgtctggagacatctagggtagccatagctgggagggtagaatggtacctagaggatggaggccacagatgctactaaccatcctacaatacacaggacggccccacgaccagcaccacgaatggtctaaccccaagtgttgtgactgtgccaaagctgagaaacccaggtttctcctcagcaagaaggaaaatccctgcaacacggatgcacctctacaggagccccaggctgacaataaccttcctcatctggtttcaaccctggatgctttcacctggtgcgtccatcagggatttcagggactccaatgagttattacccttgaatgcttggttccgcctgacaaccctgaaatctctgctgaggtgcctggtcttgaggaaggctcagcaagtggttgagggtgataaccaaatacctaggagagacttttctctccctccaggaagagctgttggtcagacacaccctgggatcattcacaagcggtcaataaaggcttggggagggccaggttttctaggccttctcaatggggtgggtgtttatggatacacaagaagcctgagaaacttctgatattggcaggaaatcaatgccccccaccctccacccccccacctccccaccataaacacatgccctgcagcaggacttggcactcaggggctcctggggtcccgatttacctgctaaaacatcctctagccaccaccgaataaagcaaccccttgccacccaaccgcgagatctcagcctgggagccactccaagggacatccagtcacattaaaacctcagccatccagagcaccaggcctggtgatgagaaagaacattttatccttaaaagcatctgaatgcccatgctgcttcttgcaaagtccaaaataatctgctattaaagaacgaggatggtttttaccaagctaatggtctacgcagacaaaatctcataaaagggcactctgttcttcttgatccactcagacatggcctgtgagtgaagaaatggactctcctcctcaaataaatcactgctgattctcacaccagcctgacactgcctcatgggttcttcaaagagagtattcccatagaaactaaaagggaagaggaatgggtctggcgggcattgtgggcagcagtgggctttgggccaaattttaagtttgaaaatcaagattccctcttttcaaggggccaccagactgagcagatacagacaccgtgaaaagagggtgccatgttcagattcaggaaacaaggatggtttctgttcagttcctccatcatccttcaggtcatgcgattcccatttccctccgtggaccaaacaattcagtggggtttctgccttttaaatatttcattatcaacatatcatcattttagcctccagaaagcattttaacatggagattctggcttaagactcttgtgggtctgtctgtctctctctcttttccttgaaacggtctcactttgtcaactaggctggagtgcagtggcatgatcacagctcactgcagccggaccttccagactctagcaatcctcccacctcagcctcccaagtacttgggactacaggcacacaccaccataactggctttttttttttttggtagatatgaggcttcaccatgttgcccagctggtcttaaactcctgggctcaagcaatcctcccctttcagcctctcaaagtgctgggattattggcttgagccaccacgcccagccaagaaccttgtctcttgtgatgcaccccagaacaaaacatcactgcaaaaacacaccaaggcatgagttttagtcctaagtcccatttatccaccatacactatgtgccaggcacaacgctaagtgcttctatggacgagcttcccttaatctcagcagtaacaaccccaggcaacgaggcctgttgacagatccatttgccactgaagacagtaaggctcagagagggtaagtggcttgtgccatgtcagccagctaaggaggggcagaaccaggatgcaaaccccagccgcctggctccagactcaggttcccaaggtcccactacacttggtcactccactgcattctggtatcctggtctttggcagagtccacgtaaaagaaggaggtagagggagtgagagggacttcatgcaataaagtttcccggcgttacactgccatcgtaattgtgtccccgaccaggacctctcccttctcatcctttccgtgatcggccctggaaaaccttccagagaactgtcctccttctcccaggatctcagagaaaattcgcctgagttcagtgtccaggtgacccaagctctgaatgcggtaacgtgcacggggagataaggatgtcaccatgagcaagcctcccagacggcatccaggagcaaccccaagactgggcaggggggctctgatgccgcccacggcgaggagggctgcccgtgctgcctaaatgggttccgaatgaaggccgccctctcgcccatgtggggctcattaaccacgaatccaattattaagacaagctcagctgagcaaatggtcaaacataaaaacatgtggaaagaacaaagaggtcaaccccattatccatcaaaaaccatcaaggtggcggccctcactgaggggtacagctctccagtgggccctcatctgccctccaaacccatgtgcctcctcagtggaaggccagcaaagccacacaggaagagttggtgtaggaaagcagaaagtgaactccaggaggccaggctggccacggagccccatcccacacacacaggcccggtaactcaggggctcacgtgtgcaggacaccgggagctcacagggacagcgtcccgggggatgcaaggaactttccctctctgtccctctctgtagggatggaaagaggagagcgatttctgggatgtaagccatctgcctcctctcaactctcgctgcccaaccagaaagggaagaaaaacaggaagatgcggggcaggtgaggagctgggtgagcaccgccagcccgcagcccagcagagcagggcttggccaagcctggcgccagggacttcccccctacccccgccacaagcccctcgccaggtgagaggcactgacagagtcccagacagatgccccagacaggacgctcagcgcaacccccgccccttcccctgctaggggcccccaggacgcggggctccccctccccttttggctagccgcagagtccagcgggtctctagtccagggacgtcgtgggagaatcaggaagtcgaagccacacagccgagaaggggcagctggcgtctcggaggccgtcgcgagctgtcactccgcgcccgccggagttgtcgctcagttaccaacttcaacccggggccggccacggagcctcccgccgcccctaccccgcgtccccggcacccccggcacccccggacccccgcgcccgcgtcacttactcctctgccgtcgccacctgtctgggtgccggtctccttcctgcctggccgcggtgcgtcctccccgtcatcgggctgtgcgcttccctcctccagcaacagccgcagcctcttctcttcgggagtgacgtcgtcctcctctctcctgggccggccatccctgcctcggggcttgccagtggctttggagctgccggaagggctggccatggctccgggggctctgcctgcacctggggaagaggaaggacccggcgcgagcggcctgtcggcggagctggggcgtctgagcgcgggctcggtgggtccgcgcggcgcggagctaggcatcggggcgggcgtgggctcctccgcgggccgctcgttgctctctggcgccctctgctggccgctcgcgcccaccgcggacacgccgggccctggcctgcgctgagctcgcctgccctggcccaagcagtcgctgtcccctgcctgcggccatgcccgctctggccaggccctgcacctcctccccgccccaaccaggttgcaccccgatggtctccctgcccaaggaggagagaagggacgccccgagagggtggacatcagccacagccaccttgtctttgctcttaccctgtgtcttgcatgatttggaggtggtgggaaaaccgaggctgctcaaaattcgtggagaattccgcctgcaggatgacatgaatgcaccttcgcgttgcctaccaacagatcttttttgagcatctctgtggaccaggcgtggtgatgggggaggggatattgtggtgaacatgacaggcatggccttcacacagtagggctcagccctgggtgagaaggcattgagaatggacattgtcaattgggcaaaaggaggccaagaagaagtgctgggggcatgggaactgaaaaagacaggaggctcagcatgtcttggcgctgggagattgacagcaacagcggctgttccaaaggaagcaacagctgagagacgtctcagagagttgttctcagcccagtggaggttgttcaggcagagggaacagcgtgtgcaaaagcccagaggctgggaaagaagcagaaagaggactgtggggctggagcgtggtgggcaagaggagaaaggtgtggtgggcagacagattgcctgggacccagccgtgcaggggcagaggagataggggatccttgcaggcccctagccggggctgaggcacagagacaatgcaggtgggcaaagggaggagacgtggagaaatattctggaggcacgccctgatgaatgagcccaggatgcactcttagtgtcagtgtggagctccttccttggctgtgtgatgagctgaactcgggggtattttctggacattgaggtgctacaccaagagtccaggacaggctgagcaccagcagctcctggcccacctcaaaagcaggagagacaggggagactggggatgctggggtggaaggggaagccaggaaggcaggagaggccagggaagcagaggaggccagggaggcagtggaggcaggagaggctggggaggctgtgtcctttccatgattctgcccaggatcctaggcccctgaactccctgagcttctccaccccaagcactggaaccatgttgcacaatggtctctccactaagctcctgatggcggaccctaccctgctgtgctccctatttcaaccctaacagctctcacagtgggcagcacatagtaggtgctcaggaaacactggtgggagagcacatgggtctgctcagcaccttcctctctcctccagctctcccctgtcatgaaataattctgataacgacacatgggctttggactctcttctattactttcaatatgctaatccatctatacctcacagcagccctgggggtgggtgctattaggatgcccattttacagaggaggagactgaggtataaagagggtaagtgacataggcacactacaggggccggggccaagtgattgcagcactcaatccccaaaggcaaggtggacgcagttaccataaaagacagcagagtcaaagctgcaaccagaacagcctgactcacagagacctatggtgccagctgatcgtggcattcctagaagtgaaataggtaagaagcctgccacatttttacttgatctgtgtttgcagaagagttctaggtcaggtgagtagaagtctaatctgaatcataacaacagagtcacagtccccagtcaattcccagacataagccagttcacagacccggagtcccttgtctgaatgggaagccaggtcccctccagaaaggactctgctccactgccaaaaatttatactgtcaatttttctcccagcctgcccccaaaggaatacacagccttttaccaggatgactgaacaggggaaaaggaactaatgagatctgtgcaggatcactggacacaggctctgaactggcactagggcgagactagggtctaccagtcagaataggcattttggaggtcaggtgaatgttggtgcaagttcatgtcatggtaaatccattgggtccccaaatccatcctctggttatatacaaagtggccttgctgagattcaaattcagggcatccaacagagaggctgtgctcttactcatgaaacattctgacactagtaaccaatttaaaaatgcaaacaccttctggggctagccagagtcctccaaacagtcatgtaaattggttctgtcaaggatttcctcctaccacctgctgagagccagttgcaaggagagactagggaagggcattgggtaactttgttgctaaaactcttttggataaagacttttgggaaaagaagcaaatagagttcagcagaagaggtaagaaagtaagtttatgtttggccaggcacggtggctcacacctgtaatcccaggactttgggaggccgaggtgggcagatcacgaggtcaagagatcggaccatcctggtcaacatggtgaagccccatatctgctaaaaattcaaaaattagctggccatgatggcacatgcctgtagtcccagctactcgggagcctgaggcaagagaatcacttgaacccaggaggcagaggttgcagtggaccgagatcatgccagtgcattccaacccggcgacagaacaagactccatctcataaaacaaaccaaaacaaacaaacaaacaaaaaagcaagcttatttttaagcctgaacaaatgtagtggtttaggggttctgcaaatacggccccaatcaggctacaagatgttgtggcagcaacacttacacccagtcactcctggctggctgagccacttttcaaaacacccttgcacagctgtgcagagcggctggctccactggcagccggcagagacataactcacactgtcaccactcccctcaaacccttttagtaagcactttttttttttgagacggagtcttgctctgtcatcaaggctggagtgcagtggcgcaatctcggctcactgcaagctctgcctcccaggttcatgccgttctcctgcctcagcctcccaagtagctgggactacaggcacccgccaccatgccaggctaattttttgtatttttagtagagacggggtttcaccgtgttagccatgatggcctcaatttcctgacctcgtgatccacccgcctcggcctcccaaagtgctgggattacaggcttgagccaccgcccccggcctggtaagcacttttaatcaatgcaacaggaataaacatttgctgcagagcggcaatgtgcagggaggaacattgttccactcaggctcagaaagcaaaacctcctggctgtttgcatctatgcaagagctcgcaggaaaaaccatctgtgtggctgccagcctcacacactacccccaaggggtgagtttctctttccatgttaatctatgccctgatgtgccatctgtcaaccaccacaccattctcagttgacatttcaaagcatctttgccctgtgaatggtcaccagccctgccctgcaagcccccaggtgacattgaacttaaatgagagagaaaacaggtttcggggtggatttcagttcagcatcttggagtctctgtgtggacatgaaatctgtctccccagccgtgggctgcatccttgtttgtcatctggttggttgttggggacttggaaactcgtgggcacctttgcaatttgtcaagaagctgcacggcccttccaacaaaagcaagcaataggaacagaagcccaagtcttcagatcaaggtgcgacttaaagctgcctcagtgtaaaaggaaacaggagtcagagggatgcctaaggcagagtctagtccccagggcagctataaggcaaagagaaagagagagagatagacagagacagagacagagacagaaagacagagagagatgggaggagacatgaggcacccaggcctctgcatcaaaatccctacaagaggggcttcctaaaaatgcaggaggctgaggtgggcgcacacagaagttcaagactagcctgagcaacatagaaagaccctgtctttacaaaaaaatacaaaaatcagccaggtgtggtggtgcatgcctgtggtcccagctacctaggaggctgaggtgggaggatggcttgagcccaggaggtagaggctgcaatgaaccgagatagcaccactgcactccagcctgggcaatagagtgagacttcatctcaaaaaaattttaaaaatttttaaaaaaggatcactatggctacttgaatggatgataagaaggtaagagcagaagcaaggagaccagcagtgagattctgcaggcgggagtccacagtggctcagaccaggctggcgctgaagaccctctggattctgtatatattttgatgatgaagcaactcactgactcttgaagagtgggctctaggagactgtatttttaacaagctctcagaggattctaatgcaggctgaagttgaagaactcctgatttaggtgaagcttctgtttcatcctaggggaagtacctactgaattttctccaagccacctcaaaagaggtgctagacaagatgtgctccaatgtctgaacatgtgtgcacagctctagagccgacctcaggacaccgagtcaaaggttaggagtacaacagtgaacaaccaacatcctcttttcaatgagctttgcatttaatgagagaaataaaaagcaaaaaaagaaatcattttcaactcacaatggtaggagttatggtgacagtatgcctggggcaatgggagcacaaagaaggggcacccaatcggccaggtgcagttgttcatgcctgtaatcccagcactttgggaggccaaggtgggtggatcacttgaggtcaggagttcgaaaacagcctggccaacatggtgaaatcctgtctttactaaaaatacaaaaaaattagccgggtgtggtggtgggcacctgtaattccagatactcagaaggctgaggtgggagaattgcttgaacccgggaggcagagattgcagtgagccaagatcgtgccactgcactccaggctggatggccagagcgagactccatcaaaaaaaaaaaaagccaggagatggttgggcatgcaatttctatcaggtggtcggaagtccttctccaccacaggactcctcagttgaagactagaaaatggtaggaattagccaggttgataggagaggtggggaagatcattcccagcagagggaagagcatgtgcaaaaatcgagacgtgagagggtgagaagctgagagatgttcatataattgtaaaaagtgactaatatagaggtaagttggagccaaatcttaaaggctctttgtcaggtttatcctgtagacaaaaggagacagtagatgtttttaggcaggggagtaatgatccactttgtgctataaaaagagcagtctggctggaggagagtgggaggtgagtagaccaggtaggaggttgcaatacaccaagtgagacaagatggttggctggaccaaggctgtggcagtgaggatggagaggagacagtagactaacttgactgagaaagagggaggaatgaaggatgaggcccaggtgttttggaagctgggtggatggtggtgtgaatctgacggggtgagcccaggcagaagaggaaatcaggagaggaaaggtaagatgaggtcaatgcaagacagacagccaagtggagataacaactgggcagttggattcatcagcctggagttatacagagagctctggaatggaaataaagaggaaaggactttgggaataggtgaatcctcccagaataatgtgtagagaaaggagaatagaacacaggggacagaaaaagggaagagatttgttattaaaaccaaccatccatcagatatcttccgatacaacacttgttggaggtttcctcagtgtgagttattcaggaccagagctaaagaccatattcccaataaaatcactgctgggaaggtcttcatgaaaacatttaatgctgcttttaaaacaacaacaacaacaaaaaggctttagctactgcacagaccctggagcaatttttcggcaagagtctatcaaacacgaatctgatctgactcaaggaggtgtcatatcaagtgtaaaaatccaattccaatgtccataagagcctttctgccaggtacaagaccctaatccagttgagtgattttctattgattaataggctgggaatacgcaggttgttggtttttgagatttccctccctgtgccttcatgccagctgtgaaagagtcaaaaggctcctaactgtcaaaataaaaatgacacttggtcacagaggaaacagggtataggtcaatcacattgatgactttttaactatgagaagccattaatgttactgaataagcaaatctgtttgcataaccagatttttataggctactgggaataaaggttttcctaagtgggtgatttgtacaacgatagcctttgggtctctgatggaacagctctgatgaggaaatgttcctttaattatgcggaaggccaattaccacattatagccacattgttttgcagattgcatataatttcaccatttccatagcttcagcactataattctggagaaaattcaggcaccaagaagacacttgaggcacattatgctggagacaaagatgttttaacaaattcaatttaagcttcaacattaaagttattttgttgaataaaacataatgcaataatgagcttgtgtatgtcaactctatagtggaggtaataatagctagagagagcatgtcccatctcctctttttaatgctcattcgagtaatacataattctatagagagaacctttctctaatatgtgcttcatctcaggttaagcgtgttttgtgcaactgtgcttcatgaaaaaaaaaaaggtaagggatctaatttgggagccattcacaaaagtgctaccacttgatgctattttatactctgagatttcttattcccagtgcctaccaggaatggactttctggagaagctcagattaatcactccttatgagaggtgacagtgtgctggcagccctcacagccctcgctcactctcagtgcctcctctgcctgggctcccactttggtggcactggaggagcccttcagcccatggctgcatggtgggagcccctttctgggctggccaaggtcggagctggctccctcagcttgcagggaggtgtggagggagaggcatgagctaaaacgggggctgaccccagcacttgcctgccggctggagttctgggtgggggtgggcttggtggccccgcactaggagctgccggatggccctgccagccccgggcagtgaggagcttagcaactgggccagcagctgctgtgctcggcttctcgctgggccttagctgcctccatgtggggcagggcttgggacctgcagcctgccattcctgagcctcccccctccatgggctcctgtgcggcccgagcctccccgacgagcaccgccccctgctccacggcgcccagtcccatcgaccacccaagggctgaggagtgtgggtgcacagagaggaactggcaggcagctccacctgcagctcctgtgcagaatccactgggtgaagccagctgggctcctgagtctgttggggacttggagaaaatttatgtctagctaagggattgtaaatacaccaatctgcactctgtatctagctcaaggtttgtaaacacaccaatcagcaccctgtgtctagctcagggtttgtgaatgcaccaatcgacactctgtatctagctactatggtggggacttggagaacctttgtgtggacactctgtatctagctaatctagtggggacgtggggagcctttgtgtggggagctcagggattgtaaagacacgaatcagtgccctgtccaaacagaccactcaggctctctgtaaaatggaccaatcagcaggatgtggatggggccaggtaagagaacaaaagcaggctgcccgagccagcagtggcaaccggctggggtccccttccacactgtggaagctttgttcttttgatctttgcaataaatcttgttgctgctcactgtttgggtccacactgcctttatgagctgtaacactcaccgagaaggtctgcagcttcacttctgaagccagcaagaccataaacccaccgggagaagtgaacaactccagacatgcagccttaagagctgtaacactcaccgtgaaggtctgcagcttcactcctgagccagcgagaccacgaaccccaccagaaggaagaagcttcgaacatatctgaacatcagaaggaacaaactccagacacgccacctttaagaactgtaacactcaccaggagggtctgcggctccattcttgaagtcagtgagaccaagaacccaccaattccagacacgtttatagacttggcactgggaggtctgcatggagcaagtgaagaaatcagcagagtgaagatagagggagaacaacatgatgggggaaaggcaaagttactgccatgttggtttcaattctgccactcatgagtgagacccatgacctcctctctctaggactctgttgttcttatctgtagagtggaggaatagaagggccttttaaagtattaacatttcctgacctatctgtaaaacgctttcattcaaactgatgggaatcttgactactttgccaagaggacataacaatcatcaagctgaatgcaccaaacaacattgcctgaaactatctaagcaaaaactgagaaagttgcacaggacagacatacctcctataagaggaagaactctttagcacatgcttagtgtgtcaaagacaatgctgtgttcacaccattcctcttcctggacatgcagaaagactacatttcccagccttacttgcagttagtttggaaccatgtgactgcatttccaccaataggaatgtaagaaatcccttcaggccaaggttatcaaaggcaagtgtgagctatgttccctctcttcctatccatatggctacaagtgaaaaactctgagatggcagaattaaaagatggaaacctccagaatctctgaatcactgttggacaacggcccccaaggagaacccctgccctgcaccagactatgctatgggtgctaacccactgagagttcagggtttattcatctcagcagcagtctattgttaacactgactaacatcctaaggtttgagagatctagcatattgttaattgaagctagatttcaattgcactgagaaacttatctatttaaaaataaaaactctcctaaaaaaaacaaataatccacattccttttaacaacatgtggcaaatttgcaaaaaaaaccaaaaaaaaagcaaaaaaacaaacaaacaaaaaaaaccaactggccacatattaggccataaagaagtctcaacaaaatccactatacgattgacattgtccagaccacattttcctgaccataatgcaacaaaattagaagtcaacagcaagaagatagctaaacacaagcatgcattaggaaaattaaaaatatcctttcatgagttaaatgaaaaatctcaatagaaattactaaacatttacaaccgaacgaaaacacaacttttcatatatatatatatatatatatatatatatatatatatatatatatatgtatgtatgtatgtattttttttttgtgagtcttccaactttgttcctcttttacaagtttatttgagaaattccgggtctcctgcaattcctcatacagttttatgctgtttgtcatttctgtggctgggatgaacttatcgtagttctcatagaccagggtttgcatgtcgctgtctagagcccggatctgctgcaccatgtccgtctcactgtccatcagctgggccagaggggactctctaggcagcttgtctaggtaaacttccgggtcaaagtgtgccccgttcagatcagtggggtccagggggtcgggccctgcagggagtcccaccgcttccccttctgagaggccgttgtaaagctttagcatcctgtgcgccttccgccgacgctccgtgagcctccacatcggggccttctggggagtccccaggtccacaccccaggctaggcccagtgacagctgctgccgccatagctccaactgcagcccacgggcgtaactttttatatttttaagttggatatatggagctacttggcttttgctttcatcacatcgttgaggaaagaggtggttgcttatggtatccctgtttttactgcaacctgtaatggatgagagcctccctgttgcagagagcaaaacactgaactgaattgtgctataacacagccctgtgttgggggattgggagtgatcatgcaaacgcttgcaaatttgcacagtgacagagacaatcgtttgggcagctgttcactacatgaaaaggcaattgaccaaaagtcagttactgagctatctcaatactttcattttattttaacttttggcaacagggtgcaattaaaggagagaaagaaaacaaagtgataagtgtaagataatgtacacacatgtgtaaaagaaaatgacaagacagggtgactctttgtctcttggttagctccttgggctctatgtctccttcctcagagaacctcgttttcctttgtccagatttgttagggtggataatccaggcacctgctcccccatgatggaagccaaagacgtccctggagccgcctcccgctgcaccctttgctgcactgcccacatggacacaactcagccgattagacttcctctcagaactttagtcttgagcaaagggattaaagggtgaagtgactgaaggtatgcccttccaaagtagtacgtgagctaatggctaaagtttgtcaagcccatccaagcacattttttcgtaatttttatttatttatttttttaagacagagtcttgctctgttgcccaggctggagtgcagtggtgtgatctcggtttactgcaacctctgtctcccagcttcaaaggagtctcctgcctcagcctccccagtagctgggattacaggcatacgccaccatgcctggctaatttttttttttttttttttttagtagagacagggtttcaccatgttggccaggctggtctcgaactcctgaccttgtgattcacctgcctcagcctcccaaagggatgggattacatacatgagccaccgcgcccagcttccaaaagttttaagcagagctcagaggtcttaaccacaggcacattggaggagcatttttgaaacgctttccagcttcctcaataggaatggaagccaaactccgaactgatgactcctttgaggaagtcgagagctgtaaggaaagccaggaacaggggcaagggagagatgcatcccaaatgatcctgtgccaattctttctggaatccttgatgtgatctcagctgccctttctatacatgacacagtgattgtggcacccactggtctagctgtggtctacaaggaacccccaaagggaagggcacagtgagcaggggcatcggcctcagtgacgaggatttgagagggcaggttggatgcagggagaggactggccaaatgccatgtgtctggacttagactgcctggttcaaattggacgtcaccctttttgacttcgtgatctggtacaagctacatgaaaatccgttgcaccttttctagtctgtaaaatcatcatgaaatgtgcactaataacgtggagactatgcagatgaaaagaaacaagctgcatagagcacagagctcagagcctgtcctttaggaagccctcagtaagggttcatgatgccatggtgtctgtcatcatcctctttatcctcatcatcaccttcataatctctttgttgttcttagggaatagtttagagggactgattccctgctatcatgggtgagatgtctatgaaaaggacaaccagtgggggaggaaagcaaaattttgaataagatttctgagacccccagcacaaccaagagcagaaactccacagtctgctgagcgcagagtttgcatattggtctcctcccatctgcccagcgcattctcctgtttgttctgaggaggaggaaacaaacaaggctcccaaccgtccctcagcactcacttgaaggggtggcctgcccctccacacctgtgagtatttctagtcgggtgggacgagagactgagaaaagaaataagacacagagacaaagcatggagaaaaaacagtgggcctaggggaccggcgctcagcataccaaggatctgaaccggcacaggcctccaagttccctcagtttttattgattattatttttattattttagcaaaaaggaatgtagtaggagggcagggtgataataaggagaaggtcagcaacaaacatgtgagcaatagaatctatgtcataaggaagttcaagggaaggtactatgactggacgtgtctctaagccagattgatgtttctctccacccaaacatctcagtggagtaaagaataacaaggcagcattgctgcaaacatgtctcgcctcccatcatagggcggtttttcccccatctcagaattgaacaaatgtacaatcgggttttataccgagacattcagttcccaggggcaggcaggagacagcggccttcctctctctcaactgcaagaggctttcctctttgactaatccacctcagcacagaccctttacgggggtcaggctcgtggacggtcaggtctttctcctcccacgaggccacttttcagactatcacatggggagaaaccttggacaatacggcgctttcaagggcagagctacctgtggctttccacagtgtattgtgcccctggtttattgagactagagaatggcgatgacttttaccaagtatactgcttgcaaacatcttgttaacaaggcacgtcctgcacagccctagatcccttaaaccttgatttcatacaacacatgcttttgtgaaattcaggttgggtcaaaatggtttgttcaaagtgactggggcaaagctacagattaacaacatctcagcaaagaaattgttgaaagtacaggcctttttcaaaatggagtctcttatgtctttcctttctacatagacacagtaacagtctgatcgctctttcttttgcctacactcactgaactgcccttcccctctgctgggccatgaccacggagaacaggtccactgtcctccctgtgtggtgcaccatggaggctcagactccgtcctcaaggctggcaagatgacagggtaagacatgagcctcctgatacaggtgatgtctctggagcccacaggactgcaacctcacactgcagggctggaggcacagactgactatttactattctgtggcctgggggctcaaggcacagagctcctcattagccaaagtcacccaagttccccaaccactaaggatttcctcataataatgcaagaagaagagaaaagtgagtgtccatagaagctttggggctcttcctctaatcaggagaaagctggtgtgtattcttcacttctttcttttctttttaaacatccaactgctttaattttcatcttttattatgggaaaatataccacgtataaatatgaaaaattataaatatatattagttcatatagaatggccagtataaacatttacagtttccactctttttcagtttacagtttcatgacattaagtacgttcacattgtttagcaaccatcaccgtcatcgtctccggaacagttttatctttcaaaatggaaattgcacccattcaccaagctctccactcctctctcttgcccacccctgggggccccctttctagtttgcaactctatgattttaactactctagacacttgatagataagtggaatcaaaccgtgtttaattttcttgttttggagacagagtctttctctgtcacccaggctggagtgcagtggcgtgatctcggctcactgcaacctccacatcgtgggttcaagcgattcttctgtctcagtctccagagtagctgggattacaggcgtgcaccaccacgcccagctaattgttgtattttaaatagagaccatattggccaggctggtgttgaactcctgacctgaagtgatccgcctggctcagcctcccaaagtgctggggttacaggtgcaagtcactgagcctgggcgtgtttatccttttgggattcatttatttcactgaggataatgtttgcaaggttcatccatgttgcggcctgcctcagaagtgcctctctgtttttttgtttgtttgtttgttttttgtttgttcgtttgactttgttttgttttgttttatgtttccatggagtctcactctgtcgcacaggctggagtgcagtggcacaatctgggctcactgcaacctccgcttcccgggttccagcgattcttgtgcctcagcctcccgagtagttgggactataggtacaacgccaccatgcttgtctcattttttgcattttcagtagagacggggtttcaccaagatggccaggctggtcttgaattcctgacctcaggtgatccgcccacctcggtcttccaagacgctgcgattacaggcgtgagccaccgcaccggccagaagtgcctgcatttttaaggctgaatagtcctccattgtatgaaggaactgcagtgtgctttttcattcatctgtccacgaacccttgggttgcttccacattttggctgttgtgaataatgctgctatgaatatgggtgtacacaaatctgtcttccactcctggcttctaattctttttggtaggtacccacaaatgcaactgcgggaacatctgatcattctgtttctaatttttccagtagacgccatactattttccctgttccttcacggttttacattccctccaatcatattcgagcattcctacttccctctagtctcaccaatgcttgttttttttttatcatatccatcctaatgtgtggtatcacattcttggtttgatttgtgcttccctatgatgagtgactttgaatatcattttagatgcttattggccattgctatatcttctttaggaacacgtctactcgagtcttctgaccattgttgatgggatgctttgggtttcttgttgtttagttctagctgttctttatatatgatggatatcagcctcttttcagatatatgctttgcaaatatttttcctaatccatgggttatcttttcactcagttcacagtgttttttgctgcacaaaagtgtctgtcatttagatgtaatccaaggaatctaattttcttttgttgcctatgcttttggtgtcatatcccagagaacattgcccaatctgatgtcatgaaagcatggccaatgttttcttttaggcgtatgatacttttagcacttggggtgaggtctttgatccagtttgtgttaatttttgcacctggtgtgacatagggtccaccttcattcttctgcatgtggaaatcaagtttctccaacaccatttcttgaaaaggcttcttttccaccaatgagctttcttagcactcatgtgaaaaatcatttgaacatatagatgagaagttatttctgggctccaaaacaaacaaacaacaacagacaaaagataaggatacagcatgggccaggcgctgtcgctcacgcctgtaatcccagacctctgggaggccgaggtgggcggatcacctgaggtcaggagttgaagaccagcctgaccgacagggagaaacccccgtctctactagaaatacaacattagctgggcgtgctggcgcatgcctgtaatcccagctactcgggaggtggaggcaggagaatcgcttgaacccaggaggcagaggttgcggtgagccaacattgcaccatgacactacagcctgggcaacaagagcgaaactccatctcaaaacaaaaacaaaaaaccagcatgatttcaagagcagaaagagaagagcttaaaaaccagcataatgagaaagttaggaagtttcttaccaaagcatctggaaatatgcaagcaattcttgtgaagtaaaattttcatactgtgctatgaaacactggaactcacttattccatctttctgtattttgggacccaattatccacttgtcttcattccctatcgcaccccttttcttcctagcgtctgctgatcacctttatactttccaccttcctgagattccttttgtgtgtaggtgtgtgatggagtctctttctgttacccaggttggagtacacaggcacaatcagggctcactgcaagctccacctcccaagttcaagcgcttcttgggcctcagccctctgagtagctgagactacaggcacgcgtcaccacgcccggctcattgtttgtgttttccgtagagacagggtttcaccatgttggccaagctgatctcgaactcctggactcaagtgatccgtgcgactcggcctcctagagtgctgggattacaggcctgagccacaacacctggccaaggtttccttttttcttcttacatagaagtgaggacatgaaatatttgtcattctgtgcctggcttctttcatttaatatacagacctgcaatctcatccattttgtctgcagcggagaggagtttcttcctttttcggctgaataatacttcactgggtgtgtataccacagtttcttcattgaaacaaatttctgaagagcaaatatttttaaaatgtctcagaatgtgaaacctcagggatactgtgtccattttattcttttctatttcctatcttatgtatatgcaagtgtataacaaagcagcaatcaatgtgtgtataaatctacaacttcaacaaatgtaaaatgtaaatgctaagtggtggctgggcgcagtcgctcatgcctgtaatcccagcactttgggaggcggaagcgggcggatcacctgaggtcgggagttcaagaccagcctgaccaaaatggagaaacactgtctctattaacaatataaaaaaaaaaaaaaattagccaggcatggtagcgcatgcctgtaatcccaggtacttggaaggctgagacaggagaattgctcgaatacgggaggcagaggctgcagtgagccgagaccgtgccattgaactccagcctgggcaacaagagtgaaaatctgactcaaaaaataaggaaaagaaagaaatagaaaatgcgaaatggtaagaaacaacaacataataaacatttgtatggtgttgatggacaatgcatttgaagataatatttgaagaaatcatattacaattaatttctgttcttactcattggagcttgatgcctctaaaaacttcgtcattggaaccacctctggtgctttaaaagaaaaaaaaaaaaatccacatactcacacaggtgcaaggaaatcagaatctcaggtattgagacccaggcctcatcatttgtaagctccccaggtgatttgactcaaagccaagattgaggaatggcgacatggatctctacacagaacctgcctaaatagattctctagaagcagtttataaagatattccacgtggactgtggaagaggatatgaatttgatgtacagcatgtcctcacttaacatctttgaaagtctcttggaaacttcacctttaagcaaaattatgtatagtgaaaccacttatttttcatcaacagtataactacacatctttgaacaactgatggtgttggaggacctcctgtacattgtttccataaagtcagttttcagggaattccaaaaggaagtgaggacttcgtgtatataaaaagatggttgtgattccacctggatgacagggttattgctcagaaactaaaagaggccacctaggtatagaggattctgtcatgaggtttctgctaaacaaagggtcccagaatcctcacccattccagtgaaaggcatagcgaagaaagcaatattcacaaaggaaatgtggaaaggaataaaagccatcaagccacagaaagaatgtgactaaggggcaggatttgcagatgtagagatttaatgtggttgccctttctcacccacacaagagaaaggatggaacaaatcatgagattcgactgttgtgctgtgcagcctccacagggcactttgtatgttcctgtttctcaggctgtagatgaaaaggttcagcatgggggtgaccacagcatacatcactgatgccaccacaccattcctggggggttgtgacacagctgaagtcaggtacatgccaatgcctgttccataaaatcagcaaacaacggctaggtgagagccacaggtggagaaggctttatacttcccatctgacgatgaaatccttagaatggaggggatgattttatagtaagaccataggatccctgaaatgggaagaaaaccaaacatagtactatcgaaatatatgaatatgctattgatgacgctgtcagaacaggcaagtttgagaagttgagaggggtcacagacaaaattagagatttccaaattctagacgatggtgaattgtaacacaatccaactgtgcagctgggaatccaacaggctaaggaaaaaggacaccaaaacgaagacacagaggtgaggattcacgatgactgggtagtgcagagggcgacagatggctacaaagcagtcataggccatcacagtcaggagcatgccttctatacatgcaaaaaggaccaagaaagacatctgcgtcagacagcccgcatgagacgtgactctgctatgcgactgcatgtccacaatcatcttgggaaccgtggcggaggtgaaaccgatgtcagcccagcacaggttggagaggaagaagtacctgggggtgtggaggggggagtcagagcagacagccaggatgctgagcaggttcctcagcaccgtgaccagatacatggacagggacagggacagcaaagcgaggataggctgcagttctgggtcctctgagagtcccaggaggaggaattctcagacacctgtgagattccgtggctctgtgtgtcttggacaccttgagaaggaaagaggattggaaaaatagcagataaaaaccagcccttaatgctggatgcaagcaattcacaaggaacatcttcacacttgcggaccatacaccgccagcaatgtttctcagttgtgacaattccaaaaaatctcagaattattacgtgatttacttttttgctatacaaggctttctgtacatactactttagagaaaatccactgaagaatatcagagaccaaaacgttatatataacaaatccgtgatctcagtaaaatacggcctactcttttcagaaaaaatacaatgcaatgacaatgtcctttctcttgaagaaaaagatctcagtctaattgaaagaaattaagaagccgtgaaatgcactctactttattctgaccccgtgctacaacttccattgatgtagaatatgtaaaaggacgacacaagagctaggaccccattatctgaaaacgacatcgaaccttatagttctcaatcgaaagattttcacatgcctgttacttttcatatttattatcatccttcggttttctgacatcacttcttcataaaagtacatgcacgctcaaagatgggagctgtgtttccaaatgaattgaatctataactcttggcccagcaccatggctcacacctgtaatcccagcactttgggtagccgaggctgatggatcacctgaggtcaggagttccagaccagcctggccaacgtggtgaaaccccgtctccagtgaaaataaaaaaacattagccgggtgtggtggcgggtaaccctagctactcgggaggctgaagcaggagaatcccttagaacctggaaggcagagattggaaaccctgtgataggatttttgacagcctagggagatattgcacctgacagcagagtcggcgtacaccctgtgatattatttgtaatatcctagaaagatatttctcctaatatcacagtggctgtacaccctgtgatcttaattgtaatatcctacagagatattactcccaataatacagtgggtgtacaccctgtgatattattcataatatattacagagatacgactcctgatatcacagtgagtgtacaccatgtttgtacaccctgtgatcttatttgtaacaacttagaaaaatattacagctaatatcaaaatgggtgtgcaccctgcgatgttatttgttttctactaggtagatattactcctaatatcacagtgagtgtacaccatgtgtgtgcagactgtgaaattattcataatactctaggaagatattattcctcatatcacagtgggtgtacaccgtgagtgattttttttctaatatccagcgggggagaggatgatattgcttccaatatcacggaaggtgtacaccccgttgtgatattgttcctaatatccagggaaggagaggatgacattattcccaatatcactgggggtgtaccacctccctccgggatattgttcttattgtcagtaggtggagagaatgatgttactcccaatatcacagggggtgtacaccacccctgtctgtaaacaccccctgtgatattgtaccaaatggcctgtgaaagagtcaatattactcccattatcgcaggggtgttcagacctgatgatattgttttctaacatccagggaaggagagtatgctattattcccaatatagcaggggttgtacacctttttgtgttattgggcccaatatccaggaaaatagaagatgatagtactcccaatattgaaataattgtacagcacccttgtgatattcttcctaatatccagaaaggaaaagaatgatattactcccaacagcgtaggaaatgtatacccgctctgtgatatctttccccatatccaggtggggagaggatcatattacttccaatatcgcagggtgtgtacaccccctctgtgatctcgttgctaacatccaggtttggggaggatgacatgactcccaatatctcagggggagttcaccccccatgaccttgtttgtcatttccttggtggagaggatgatattactcccaatatcgcagggggtgtacacacccctgtgaaaatcttccttatatccagagggagagaggatgatattactcccagtaccgcagggtgtttccacagccctgtgatactcttcctaatatccacagggagagaggatgatatgactcccaatatcgcagggggtgtacacccctcctgtcctattgttctgaataccctgggagggagaagataaggtgacattgaatatcacagggaatgtacaccctccccctctgatacccttcctagtatccaggggaagagaggataattgtactcccaatatcgcagaggcagtacaccccacctgtggtattgttcccaacatgcaaggggagagaggatgatactactcccaatatcgcaggggtgttcacatccccagtgacatttttcctaatatctaggggagagacaattacatgacagcaaatgtcgcagggtctgtacatcccttcttgatattgttcctaatatccaggggggaagaggatgatatcgaatatgaaagggggtatacaacccccacccctaagatactgttctcaatattcttgaggggagacgatgatatgactccaaatatcgcaagggttgttcacacccccctgtgatactctttctaatatccaggagggggagaaaataacatgacttctaatattgcaggtggtgtaaaccccacctgaaatatggcaccgaatatccaaagagagagaggatggtattcataccaatatcgaagtgtgtgtacacgccccttgtgacatggtttttaatatccagggggtgggaggatattagtcccaaagtcccagaaggtgtacactacccctgtgatattgtccctaacttccagagggaagaggatgagatcactcccgatatctcagaagttgtacatcccctgtgatactgttcgtcatatccagggaggcacaagatgacataccattgaatttcacgacaggcgtacacgcacactgtgatattgttcctaatatccaagaaggcagaggatggcattactcccaataaagcagtgggtgtacactacccctgtgttattgcctctaatatccggggccgggggagggggggagaggataacattccctcaaatgtagcaggtggtttgacgcccctcgtggtgttgttttacatatccatcgcggaagacaataatactattttgatagtccgattcatcccctccacctttccggaactctgaggccgggaggcagcaggcaatttccgtgtgatccccaattcctttgccgtcttctgtagcaagtcagccacaaacgcaggcccgttatctgagccgatccggaagggcagtcccaatctacgaatcagatctcgaagaagcacacgggttacttcacgagctttctcagttgtgttggataagcctccacccacccagagtaggtacggccaagaactagtaaatacttgttacctccacactttggcatctctgtgaagtctacctggagatcttctaagggggctgctccataagcttgtatgccgggtggaacggctggaccttgcctcgctttatgctgtcggcaggtaacacaccgctgcctcaccgttttggcaagggctgagaaacgcgagatgtagaaataccggcctaacaacttttccagtgactcctgacctcgataggtggtttcttgcacagccagtacaactgcagctcctagcagctgtggcgcagctactctccatccttcctccatcacttgtccttccctctacctggacaaagtccttttcttctttagaataagcaggtccaagatcaggtgcttgagggagcagaggagctgtgactgatgcctggaaacgggcagatgctgcttttccagcctatgagtcagcgcgggaattccccaagcccaccaaggtggaagctcgctggtgtcccctgcaatgcataactgccaccttgtggggtttccatactacttctaatacatagaagatttctggttgatattttctgtcttttaccccagagtttaataggcccttttctttctatcacgctccatgcatgtgaagggttcaaaagacataccgagaatcagtgtaaatgttgacagtctcaccctcactgagctctaaggcccaaatgaaagcaatgagttcagctttctgggctgaagtggcctggggcaacgatctggcttcaacaacagtgtccagggttatcactgcataccctgcacctctctctccttgggggttgaagaagctgctcccatccacgtatagttcccagtctactgatgcccaaggctggtcccagaagtcaggtctgctagagtcaactgagtccaacacttctacacaatcatgctcgacggggctctctgatagcgggagcaaggtggcagggtgttacaaacttcaatggttacacggggattttcacagagcaaactttggtacttggtgagtctggcattcattagccaatgatgtcctttaatattcattaaagtcaccacagcatggggggcctttctgttcaggttctgcccaagagtcagcttctttgcttcttgtactagcagggcagttgctgccaaggccctccaacacaggggccatcctttagagaccccatctagttgtttagagaggtaggccaccggcctcggccaaggccccacagtttgggttcaaagtccggctgccatcttttctctctctctgacacataggatgtaaaagactttgtcagatcaggtagccccagggctggggctgacataagtttctcctttaactcacgaaaggcttgctgttgttgggatccccattcaaaaatttcccatccccgccccctttgtgaccttatacaaagtcttggctaatactgcaaagtttgggatccgcagtctacaaaaccccacagctcctaagaattctctcacctgccttctgctcttaggctctgctagattgcaaatgaccggctttctttctgatcccgggctgcgttccccctgtcggatactaaatcccaaggaacatacctgctgtcagcagatctgagcttttttcttggacaccttacacccacagtcctccaggtgtcggcgtagggcaatctgttcccttggtgcacccgactgccatgaggtgtcccagcaaaagctcatcaacctactggagcaatgcgcagcctaggtctctggtgggaaacttctggaggtctcaagccaacgcctccccaaagatggtgggggagttcttgaacccttggggaagcccggtccaagtgtactgagtagtgacacctgactccggatcttcccactgaaaggcaaacagcttctgcctctcaggggctaatctgatagaaaagaaagcgtctctcaggtccaagcaggtgaaccagctgtcctcagctggcagcaaccccaacaacatggacgggctaggtactgttggatgtaaagtcagggtagcttgactaaacaagcgcaaatcctgtcccagcctgtaatccttggtccatggcttgggaacaggcaggaggggagtgttctgtggagactgacaaggaactatcataccaaaagttcttaggtgcttaagatggacctggataccttgaagagcttctctggggaccaggtcctgtttttgcctaagtggctgggccccagtcttaactagccaaccctggagggttgtcttctgcccgtactcttggcctctgcttagccagagctggtcttctctcttggcccggttcagttcacaaaagtctccattcctcctctcgggggaccataaggtcataatgactcccgtggcgggtaactttagcagcaaagagctgtgttctgtcaaagagagagcagctctcagcttgctaagcaagtcccttcccaacaagggcaagggacagtcaggcatgtacaaaaactgatgaatcacttgatgtcctcctacagtgcaagtcccaggcaagcagaaagcttgctttgctgaaacccccatggctccggtgatgtcaagggtctttctggataacgggcgaccggagcggttactagcgaatgttcagcaccgctatccacaagaaagtcaatgtctctacccccgactctcattctaaccagaggctctttggagacacttgagcctggtctccctcagtccaataatccttttgccaggttgagccgggccccttcctccttgtccggggcctcctgctctgagtcaccttgttttcttttgagctcagggcatttgttcttccaatgtcttatttctttacaataagcactctggttacgctgcaaactctgacagccaagctgagtttctttcccagggctccccttcccttgcttctttggggggacagctctgattgctgcagctaacaaacaggtcggcgttttgccgggcctgatctccattctctttgcgctttccctcgtggcttactgtatccctgtttacaaacacctgcttagctatttctcatcaatgtgatgtattcctccctgcaagcccagcctgcttctgcagttttcttctaacgtcttccgcactttgacggactaaagccatttgaatcatgcgctgattttcagggttatcgggatcaaggggagtatacataccataggcctcacacagtctctggtagaattgtgctggactttcttcttttccctgaatgacttcagagaccttattaatatttgtggccttctgagctcccctcttgaatccttccaagagagcttccctgtctcggtttagcctttgcatatcctctctttcatgtgggtccaactgggggtgggttcctggtaactaggtccttccatactcttgggggttttgataatcagctggtgcatgttcctctagccacttagttgctgcgtggagccctctccgcctttcgcctttcacctctcttaaagaggaacatgagcaaccggtggcgatcagcccaggtggggttgtgggtctggataacagtttggagcaaatctattagggcttgcggcttttcgctctaggacggggtattgttttcccagttgagaaggtcggcagaggtgaagggcttttacacaaaaacacgcctctccaccacgtgaccatcctcctctctcccagtataccgctgctctctcaggggcatttggatccccgttttgggtcgtaaacgagctgccaagggaggggtggaatggcgcaatgttacttaccgcaattaataatatcaattattaattgatactgataattatcaatattaataactgatcatataattcttaaaatcaatacctataataatgataattcatattaaagagctatactcacaataacaacaaatgatgaatgttaatgattaatgacgcctggtcttagtgatattgatcttattcattagaaaactgtcatattaactcctaataattaacattaattttaataatctgaacacttttttagcaatgatttcttaatattaatattagtaatacatattcatgttaataataaatgaggaagaattaatacgaatattatccctaatacctcagtgggtgtacacccacctgtgatattgttcctaatgtccagggagggagagagcatgatatgactttcaatatcgcagtaggagtacacccacccggtgatatttatccgaatatcatctccagggggtggcgtatgacgttactcccaagatagcagtgggtgtgcatccacccggtgatattcctcctaatattcccggaagaagagaatgctattactcccagtatctcaggaagtgtacaccccttctgtgacattgttcctaatatccggaggggagagggtgatattactcgcaatatcgcaggctgtgtacacccaccctctgatattgttcctagcagccaggaagtgagaggacgatatgactccccatacagcaggaggcgtacacccatcctgggatattattcctaatatccacggagaggagaggctgatatgactcccagtatcgcagggggtgtacatcctgtctgtgatattgttcttaatattcaaaggtggagaggttgatattactcccaatatcacagaaagtgtacaaacccgtgtactattgttgctattatccagaagaagagaagatgatatcacccccccatcgcaggaggtgcacacccactctgtgatattttttccaatgtgcagggcaggggaggataatactcttcttcatagcacacggtgtgtacagccccgctgtaatatggtccttaatattccaagcggagaggatgatcttactcccaatactgcagaaagtgtacacgaccccagtgatatggtgcccatgatccaggacagaagaggatgatgttactttcaatatcgcacagggtggacacgcccccagtgatattgttcctaatttcaacgtgggagaggatgatactacacggaatgcccctggggtaaaaacactcctgtgatattgttcttaatatcaaggggaaagaggatgctattactccaaagagcgcagaggatgtgcacccgtctgtgacatagttagtaatttccagaggcggagaagatattactgacaataacgtgaacacactgtgtgaccaccgtggatcgtcatatccgggggggagaggggggtgatatgactccccgcatcgcggggggcgcccgcccccctgcgatgtggatcgtcatatccaggcggggaggggggggtgatgtgactccccgcatcgcggggggcgcccgccccgctgcgaagtgaatcgtcatatccagaggggggtgatatgactccccgcatcacgggggcctcacccccttgcgatgggggtcctaagagccagcgggggataggggctggctcttactccccgtaccccgggtggggggcctcacccccctgcgatgggtctcctaagagccgggggagagagtggctggctcttactccccgtatcccaggaggtgtgtacaacccctgcgatattgggagtaatatcatcctctccccctgaatataagaaacaatatcacaggaggatgtacaccccctgcgatattggaagtaacatcattttctccccctccggatattcggaacagtatcacagtgggtgtgtacagctcctgcgacattgccgctagtatcttcctctccctcccaggatagaaggaagaatgttacaagggggtgtacaccccctgcgatattggctataatatcttcctctcccccgctgccttttaggagcaatgtcacacaaggggtgtacacccgcggctatattgggagtgatatcatcctctccgtccctggatattaggaacaatatccctagggagtgtacacatcctgcaatattcagactaatatcatcctctcgccgcctggatattaggatcaatatcacaagggtggtgtgcacccccggcgaaattggaagaaatatcatcatctccacctttggatgttagggacagtatctcgggggaggtctccgccccctgcgatattgggagtcatatcatccgctcccacccaggatattaggaacaagatgaccgaagggatgtacgcccactgcgctattttcaataatgtcatcctctaccccctggctattaggagtcacatcatagaggggtgtacactttctgcgatattgggagtaatatcctccccccacggatatcgggaacagttctattgattattaatattacaaatataataacaattaatagtaatcatcaatattaataattactgtagagacagtaaaacagtacggatgaaaaatattaacggttactatttataattaatagcaatttcagtattaataataaaataatgatatcactaattaatgttacttcaatcataagtgatgttggtaataaaacaataattaatattaagattaataactaatattaaaagtgacattaatattaataattaattttaatcatgcataatcatatctcaaaaataatcattaatgattaataacgttatactgttaattaatattaccattgataattattaataagactgatgtttaataattcagaatattattactgctaataccgcagggggtgtacatctacttgtgataatgttcctaatatccagggatggagagcatgatattagttttcatatcacagtaggtgtacactcaccctgtgacaccgatcctaatacccagcttgtagagtatgacatgactgccaacatagcaatcaatgtacagccacccggtgatattgctcctaatattcacggaagaagcgtatgatattactcccaatatcgcagggagtgtacacctcttctgtgatattgttcctagtatcccgagggggagagggtgataataattccagcaacgcaggctgtgttcacccagcctgtgaaattgttattaatatcctgaaagggagaggatgatattactccccataatagagcaggaggtgtacacccaccctgtgatattcttcctaatattcagaggccgagaggttgatattactcccaatatcgcaggaagtatacacccctgtgtgagatggtccttcataatattccaaggcggagggggtgatatgactacatatatggcagaaagtgaacaccccccagggatattgttcccatgatcctggagggaagaggatgatattactttcaatatcacagaaggtggacacgcccccactgatattgtttctaattgcaacgtgggacaggaggatatgacacgcgatatccgagggagtggaaacacccctgtgatactcttcttaatattcatggaggaagaggatgatattactcccaatacagaaaggtgtacaccctctgtacactgagggtatacacccatctgtgaaacagttcataatctccagagggggagatggtgttgctcaaaataaggtaaacaggctgtgagtccaccgcggatcctaaaacccagggggggaagaggggctagctcttactccccgcatcgcagggggtgcctcacccccctgtgatgggggtcctaagagccagggggggagaggggctgttccctacgttggggcactgaggtccctgttttcttgtaagctgccattggggaccactctcggcttccaggggcccccttgtaggtggcaccatggccacttgccctactccaagcctgcagaagagcgcctctctgccatgtccctttcttttaaaagacttgcctgactggttcaggtccattaggtagcgtcccatttgattagctcaaaagtactgtagcccatcacattcactcacaggagggcattagcggggtgtggacaccagggagtgagaatctctcaggccagtttagcattcagttggttagccaggttcagtggctcacgcctgtaatcccagcactttgggaggccaaggcgggcagatcacctgaggccaggagttcgagaccagcctggccaacatggtgaaacccagtctctactaaaaatacaaaaattagccaggcgtggtggtaggcgcctgtaatctcagctacttggaagcctgaggcaggagaatcgcttgaacctgggaggtggaggttgcagtgagccgagattgtgcctttgcactccagcctaggcgatacagcgagtctcaaaaataaataaatgcgaaggctgctgagcacagtggctcatgctttataatcctggcactttgggaggccgaggcaggaagactgcttgaggccaggagtttcagcctagcatggacaacacagtgccactctatctctaagtaaaataaaataaaataaaataaaataaaataaaataaaataaaataaaataaaataaaatagtaaaataagaattcagttggttaaaagaaactcactaggtccagcccacaatcaagggatggaaattacacaaagttgtgaagagtcaagggtgggagatcgctggcagcccttatagatgctgcctatctcacatacctgttggacagcttctctctcctagctgggggtatttggagcgggtgtcgaatcctgctcttttttatgtctgttgccttttctcgcggtgatgtgtttcctgtgtgttctgtaattttggatcgtgagctgagcttcagaggggctttagtggtcccagggtaccactaagccaaggcaacttttatttttgagacagagtttccctcttgttgcccaggctggagtgcagtggcgcagtctcagctcactgcaacctctgcctcccaggttcaagctattctcctgcctcagcctccagagtagctgggattacaggcacacgaggcttggctaattttttgtatttttagtggagacggggtttcaccatgttggccaggctggtctcgaactcctgacctcaggtgattcacctgcctcagcctcctgaagtgctgggattacaggcgtgagccaccactcccggcccaaagcaactttttagtgttaatttctcaactctggcattcctagaccacacaggtggcatgactttattgtaggagttccacatttacataagagaggcctgaaaacgcaacgatctcatgggaaacttgttcaccacctaaagctcaaaatttctcacctctctctgttcccctgggtggaaatgtttctgtccctttctctaaaggtgttgcatttctgtggccccaacttcatcatgcttgactgtaaccctaaccccctgccttgtaagggataccaacgctcaacccagccctgccctcaggcagttgcagcaccagctcctctgtccccaccttggttctcactctcctcttcacttctggccttaggggacttaacttattttctgaagaactcagctatatatttattttattttatttatatattttttgagatggagtttcactcttttgcccaggctagagtgtaatggcgtgatcttggctcactgcaacttctgccttccgggtttaagcgattctcctgcttcagcctcctaagtagctgagattacaagcgcctgccaccactcctggctgatttttgtatttttagtagagatggggtttcaccattggccaggctggtcttgaactcctggcctcaggtgatccgcctgcctcagcctcccaaagtgctggaattacaggcgtgagccaccacgcccggcctcagctctatagttaaaaggacatttgtttcttacccagcatttctaggtgttttgaagagggagacttctcaggttatctaacctgctactgagaacttaaagatagggaaaatcttggactggagattcttggaatcacataattgaaaaatcccagctgggcgtgatggctcacgtctataatcccagcactttgggatgccgaggcaggtggatcacctgaggtcaggagtttgagaccaggttggccaacatggtgaaacttcgtctctactaaaaatacaaaaaaaaaattgcctggcttggtggtgggcgcctgtaatccccgctactcgggaagctgaggtaggagaatcgctggaacccaggagatggaggttgcagtgagctgagatcatgccattgcactccagcctgggcaacaagagtgaaactccgttgcaaaaaaaaaaaaaaaaagaaaagaaaagaaaagagaaagaaaaagaaaaatccccacagtgcagatcgacaaaatcacagagttgctttgggagcgagggtggcaatcagacacggaggccatgacacaacctgcttatccactcaggggtccagaacctccacccagtcaccttatccgggggtgatggagacaggggaggtgccacctacgccagtgtcatctcttacaatgagctcttctcctgctcgaaaagagccagcctgctgagcttgctgccagggcccgtcgcactgcctgcgctgtgttgcccgtcgcacagcctgtgatatgtgtttcccatcatgtgtgcatgtgtgttgtcatgtagtgtctgtcacaggtgttacccgtcacgtgtgtttgcatgttgcatgtgtgtggcctatcaggtgtaaatatgtgttgtctggcacatgtcagcatctgggcattctccgtgtgccaggagcagccaggtggcctgtgaagccttctcatgggaaatgcccagataggaagagcacagccaggagccaagcccctgagtggccactccatgtgcctggatcaccttcaagtctgctcaacatcacagcctctgttccttggcaccatggacattggaattgactcggaactgggaagagctgtaggcccactatccaggcacctgctccccgtttgcccagcatcccaggggcccacacccttccaaatatcaccttgccctccattcagaggtgaatcatctgagcgtcaggttgcccaactccgactggttttgctggagcctgcctagaggatgtcgccagccacctccagagaacactcagtctacagatgccgagggggaactggaagcacacagtgctggccttcacccaggttatggtggcacctcgggaccgcttctgagtctgcttgtcactgaaggtcggcgtgaggcaggcagcgttccctcccagatttagaaaatgtcaagtctcccgccgcacccttttgtgtttcttacagggcctggtgcgcttgctgccgccacactaagggctccaacatgttccctcacacactcaacagagaaggaacctgtggctcagatggcagactccctgtccaaggccacagagtctggccccagggaccactagaggcttcaagaaccaaactcacatgagggcagagaggagagatggggccagtttagggctgggagaatccatagagcgatgctgaggcaggcatggagcctggaggtacggacgagggtctcgccaaagtcaggggtaaagaggctgtggggagtgaggaatggtgtgggccagccccgggcctgctggggtgcagctgggggctccatggccctcccacggcccccacttgtcctcacccaaccgttcagagctcttcatggcgggggtgtcctctcctctggccacaagaggagcgggtggaggaacggcaccttcaggccttgtagggggtctgcccctccaccagcctgtttctcgtgggcatcgcagctgaggctgtagccgggaaagggtagtcaccgagcgtacctggcctccaaccaccacttccaaggcccctactgggcacagggtgaccccaccgtggctcggaagtggaccctgtccgacgcgggggtggtcgctggagggcggaggatgcctacacaggcctctggagggtgtgtctcgggagtctgtctcgccctctggacccatgggggaccagcaacgccgtcacaccctcctctgtctctgccagccgctccgccgctcccttctcctggctggggctggcaaaggcaggcaggtatgggggggcggggcctcaggagggaggaagggctggtgggcggggcctacggacacctcgccccgcccccagtagggcgcggcactccccacaccacgcggtccccctaggtcagggcctgtcaccactgcgcccagaggccgggccagccgtgcgtgcatcccagggcatccgtgcatccgtcccccgcggcctgggactccccagtcaggacagtacaaaatctctttattgctcattttctgtaaaaaatcgtggctctcggcggaccctggggataggaggtgcaaagtgcgctcacacgcggcccgggtccgcggccgagagctgtggggatctggagcgggccgggtcgcaagaagaccctgaccgtgctccggcgctggggcgcgtgctaagggcccgcggggtttcagctgtattttcgaacccctgtgcttggccgaggggttcccaaggctccactccgccttggagggggctgcggaagcccggaggtgacctgggctctgggaggggcgtccccaacgtgggggaggggagacaggggcctttgaagacagcgcgggactcggagggggtccccccgacctcagacgtggtaaactgaggccggcgaggagggaggctgagtccggggaccaggcggcccctcactgctcctccggcccgtctcccccctgcgcctgttcgtacgggcagggccggcggccgagtccagcgggctcggggccaggcctgggccctgcgggcggcgcctcctcctccgcgccgtccccatgctcgccctccgcgtcgctctcgtccgagttgtcctcctccaagtagcggtaaccgcgcaccttgtgctggggccgcgggatgcggggctggcgcggggccacgccccggcgcagcttctgctccatccgcaggtaggagaccgcggccgccaccagcgtcaccagcagcaccgccagcttagcctgggcgtaaggagagggatgccagggacccgcggccgcctcgccccgcaccttccccgcctatgcccctcgctgagataggcccttccctcctccgggagcctcccgggccacgcggccctcaacttctccagcccctccacccatgcttcctggaccgcctcctgcaggcgaggctcacatccagcactgtcccttacagtcgccacgcccctggcgacctcagtgtcccacactgtaaggggacaatgcaaatccctttgcctcatagggtgcatgcgccagtgttgataaagtgctggccacaggccctgccttcccagggctcacaacactgtgtccctgacacacccgtgggctgtagtgatgcttttcatggggttttgactataacccgcagtcaggaatgatttcacaccatagcccagtacatacacacatatctgtatgcatacttcctgctcttttcttttttccagacacggtcgctccgtttccccaccgcgccccctccctcccttcccccacccactgctggagcgcagtggcacgctcacttcagcctcaatcttccaggctcaagccatcctcccacttcagtctcccaagtagctggaactacaggcacacgccactacgcccagctattttttaaattttttgtagagacagggtctcctatgttgcccaggctggtcttgaactcctggcctcaagcaatcctcctgcctcagcctcccaaagtgttgggattacaggcgtgagccaccatgcccagcccactcactgcttttcttttttttttttccttttttttttttttggaagacagagtctcgctctgtcctccaggctgaagtgcggtggcgcgatcttggctcactgcaacctccatctcccaggttcaagccattcttgtgcctcagcctccagagtagctgggatcacagggacgtgccaccatgcccagctaatttttgtgtttttagtagagacagagtttcacagcctgttacccaggctggtctcgaactccagatctcagaacccccacctcagcgtctcaaaatgctgggattacaggcgtgagccactactgccagcccactccctgctatttttagttctatttttatttttattttgagacggagtttcgctcttgttgcttaggctggatggagtgccaacgccccgtctcggctaactgcaacctccgcctcccagttcaagtgattctcctgcctcagcctcctgagtagctgtgattacaggcacctgccaccacgcccggctaatttttgtatttttagtagagacgaggtttcaccatgtcggtcaggctggtctcaaactccctacctcaggcaatccactcgcctcggcctcccaaagtgctgggattacaggcgtgagccaccgcgcccggcctttagttctatttttaaaaaatgtttagcaactgggacttgctagaccgagccaccattttttgtgagcagagcatgaggagcctgctccccttcaggccatgaagagagacagacccaacatctggagaacaaggtaccaaacagcccacaggatggctgtgatgcacccacaaatcccctcagagatgggcaaactgagactggctggaggtgggccagtaagtggggtgctgagttgggggccacccagtgggctgcaggaatggggccttggcccagagactggcttgggaaggggtggcatttaggaagctgtgaagccagggcaggggctaaggaagtacctgtcattgggcatggggcccccaaccctgcccagtctcaccttcatgtgcaggctcgagcccaggtacacggtgaagatggccacagcctgccaccagtggtagatggtgaagatgaagtcctgtctctccttgtcttcgtacaagattcccaggagtgctgcaggcaggcagtacagggcaggcaggggagaggtgtcacctggggcctggggctaccgagctaccatctacgaactttactaagccctgtatgggtcccagccccggaccagagagcgcctagaaagtgctgtgaggcggtcctggcctgccccctggtggagaccctggtcaccacactgctcacacgctaagcagaagtaggagcaggtgcctcgggctgtgtggatgcaggtgttcccgctccgcaccacatgcgtggcctcaaaagaagaaagctctgtgcttagtcatgtcctgtccccaacccaggtgtgcagtgccaagcttgcaggcgctgtttctcctcctcagccaggactagagagatcgaactgtttgcagctgccaactctgcaaatcaaacctgaagctaagcatggagaggggggattcctttccagtgagtcctcccagggtgggcaacaagagtaatggattgggagtcagaagatgcacgctcgttctcagggctgtaatgttggctctgtgggtgatttgggtacttaactccccagagctgcttttcccaatggtgagatgagcttatgcctattgtgtgctgtgttctgaagttctaaagtgagaaagtgggcatggcacctgccaaatcataggggccactattaacaccttcaccaggcactcaggatatgaacactcctgttttggggccctgcagggtgactttacccccacagtgctgctatgaagagacaaggaccccccggggttcaccggaggagatgggatatggagctgggcagaggggatgccaggaccagacagggcacaacatgggttcaagatacccaggctggactctgcccagaattggctatccttgggcaaaacggccaagagactgtggtgcagtatgaggctccagcccctgctacagacagagacacagagccagcctccgccctgccagcagcaggcatgacctcggctactccacacccccaaggatgacgttcaaaactgttcacagcttcggcccatcagaacagacactgacatggatgcccggcaggactgcccatgtgtgctagctgtgtttcactgcgtgtgcccatctgtggtcagggagcatcctggagctgaacatgggcccacccgctgccttctgcaaacagggccctgttccccagcagcccagacctggggcctggactctggtactgagcagactgggttggggctgcaggcctgctcctctctatacaaaggcccatgtctgtatctatgccatgggtgtacaacaggccacttgctcctaccacatgctccgtgaagcagagaccaaaacatctgctccaagtgtcatgaaaactatgccagggtaagccctgtcccctggtatgaaaagggagaatccctgatgtgtttttcacactgtccctaaggggtgtccacagagccccacacctgccccatgtagccacgagacttcacactgaccctccagtgttgatggggccctgtgcccgctctggggtattaacagaatgtccatggcatggaacccccatacctgtctccagggtgtccacaccctacccatctgtccccagtgtgtccataagacttcccttccacccccggagtgtccacaggaagccccacctgcctctgccatgtccacaggaccctatgtgaccatgggaccccatatctgtccctgggatgtctatgtctcgccaaccacccacagatagccataaagccccctgccccgcccccccccccccagtgcccacagctatactcactgctgagtccagtcttgttcagggcactgcccacaccccaaagggcagctgccacatagaggatccagctgtgttgcaggacccgaggcacaggggcccagaaaaagaggatgaaggtgagcagcaggtgcacccctgctccggccaccaggggcaccgggcgtggcagccacaggcccagcaggcccaggagtgaggcggctgaggcgcccaggctgtaagccacgaggaggtaagccagccgctccagccccaccgagcacacgccatagccctgcggggggacaaggggtgagtgttgaagtctggaacagcccagaccacagtctcagccctccccgcatcgcgggggtgcctcacccccctgcgatgggggtcctaagagccaggggggaagagggtctggctcttactccccgcatcgtggggggtgcctcacccccctgcgatgggggtcctaagagtcggggggaaaagaggggttggctcttactccccgcatcgcgggggggtgccttacccccctgcgatgggggtcctaagagccagggtggggagaggggccccccgcgatacggggagtaagagccaggtggggagaagggctggctcttactccccacaagaggtgttccttaggccacaccctgccctccctggactgcctgacctcgctccaaggctcaggggaaggttctgagggcaggtgtgaaaatgcttggaatgtccctagacaccgtgggctgtaccccacaaggaactaaacactctgtgggtgctatcccatttcgattcagagaagttaaaataacttgcccaaggtaaaggggggacgggggtaagagagggaagagaaagcaggagggggatatttgggatatacatgtacacacttacatatgtaattaaaaattattctttgtttacttgaattcaaatttacctggctatcttgtcttttgtcgggcaatcctttgcaggctgtacttaccaaggcgataccagtgcaggcaaagagcacctcgaagccgctgtagataaagaaaggcacgaggtggcgcaggcggtagtcacgcacgtgcttgaagggcagctggaagatgttgccccagcccacgctgcgcagatcgatctcctccgtgggccggtaagcggctccgcacaaacccagcacctgcgaacccattacttgaaggggcggccagccaggcccaggcctggcctccaggcttcagccccgcccttcagatgcaccacgtgcctgggccttgccccagctcggccccgcctcccaaaccagggccccgcccctgagacactcccacagacccaggtcttgccttatcccagctcaaggccccgcctctcagcacaaagccacgccaccacactccgaaagacggtggtcttgcctcccagcccaaggccccatcccctctctctcacatacacacacttcacaactcacattcagacaaatccatagacttcaaccttccttctcagccccgcgccagacctcagccccgccttccaggctagtccccgcccctcggacacacccacagacttcggccccgcgtcccagcactaggccccgcctgacacagccacggactgggccttgcctcccagctccatcgccaggctgcagcatgccaacgccttagttctgccgtccagtatcacttccagtttgagccacaccttccagccctcacccttggtcctgtccccaaccccctcacaggtctcagtcagtcttctaagatcttgtctccagctcgaaactgtggaccaagcctgttccctccttcccctggcctctggatgcccacgcctgcctcggaccacaggcctcagccccgcctccgagcctcatgcccgctctgcagcactcggccctagctccccaactcagatcgcgctcccaggcctacggcctgccccgaggccacaacccgacccaggccatgccatccgatccagaccctttctcgcagactcggtccccagaaccacactctgcttcactgactgtcctgcccccatcccgggccgcaccagcagcatggccaggaagccactgccatgagcacgctctccaccacaatgaggtttccgctccgcgggagcgtccgcagaaccgtcttgttgaagccgctgaggatcccgtggctgttggtgcctgggaagggtgggggtgagggcaccgtgagcagagagtagggcacacagtcaatccagccaccagggtggagccacgcaggccgcggaggagcggtggagggcgggagagtgagagcaagggcagagttccttcagagagcagtttggaggtttggaccactggggctgggtttggaccactggggctgggtgttccccgggaaaggggcatctttcccctgcttcccaccctatttccccaaggctcagtggacctcacatttccatgcacaccccctgcactgattgagctctgactgtttgcctggccccaagaaagatcccactggcagcctcagcccagatggtgccttctccaggcagtcttccccgcccacccactctcctggctgggtcagatgtcctaactacttactcctacagggccctgtgtcttgcccaccagagccgtggggcactgggctgccagccctgaatcctgtgagtgagggcccagtgtctgctggggaagtaagcaggctttgtggactcctccccaacccccaacaaggactaaccgcagctctgcacattgtacagcgtgtggttcaggtcatacaggtagtggttcaggaaataaatcatgggcagctgggcgcaggcgaagctcagctgcagaaacaagggcagttgggaccagactcaggcacagagccaggcaagggacacaggcatggtctggggaggggtccaggcacagccttgggggaacaggggccttcccagttctgggagtagtgtggttacagggccgcccaatgaggaagacctcctcctggccagcattgtggaaaagggcagatgagatctctatctctatggatgagcaagctggggtgggctcaagaaaggaagatgggcagcctgggcaacatagtaagatcctatctctacaaaaaataaaaaattagctgggtgtggtagcacacgcatatgatgccagctactcagaaggctgaggtaggaggatcacttgagcccagcagttcaaggttgcagtgagctgtgactgcactactgcactccagcctgggcaacagtgcaagaccctgcccccaacccccaccaaaaaaaaaagaaagaaagaaaaagaaatgaaggtggggcagatacagtggtgtgcgcatgtagtcccagctacttgggaggccaaggtgggaggatcactggagcccaggagttcaaagccatctgggcaacatagtgagaccaggcctcttaaaaataacaataataaaagaaagaaagtgggactagagggttgagactgtggatgggctccaatgcgtgggtctgcccctgccacccaacaatggcccacgtggcactcacatggaagaagctgtagaagatggcttggaagaccaggagatagggcgcgtgggagccccgcggaggccgctgcttcatcccctgcccatcctgctccttgtagtgggagtactcatggtacttctgcgccatcctggaccacaaaggagagaaggctctccccagcccgacctgtgccactcctgtgtgtcctgcacccagagctaggagcagaccagccccggtgtggggaaactgaggcccagagggcggaaggggcttcctgtggtcccccagccaaagttggcaataaagtggaggcttggccaggtctccagcctcctgccctgctgcccaccaggctcacctggtgatgtagttgcccatggaagcccaaagaggcacgatggccatgcccagggccacagccgagggcacaagcgtgtagtagcgctcccagtagttggtggagacaaagagggcgtagatgcccacagcgaggaacatcatccacttcgttccaaaaaacctgcggacagtgggagagatgctggcaccacaggcctgctggaccactgtggcctgaagccaaacggggccacaaccgcaggtcccagctcacagggctttgtgaggtagagagagtcgagggcactgagatggaatatcagatacacagacttgctgagtggcctcaggcaagctactgtgcctcagttttcccagctgtaatatgggcacggagcccaaaccacaggcctctcatcaccactgtgaggatggagagtgacccatgggtgtaaccagccctcatgcgtgttctgggctctctgattctcccattcccccttctcctcccaagctcatgcactgtgtctgtagggcccaggggcttgactcaggctgggagaagagaaaggaagaggccccactgctgggagcagcagagccagagtcccggcacccctgcctccagtccattgcttttatgaaccatggtggtcagtcaggaagtttccacctctctgggtctgggaaaaggtcacacagtgacaatagaaggggcttggtgagtgacaggatgagggctcaaccacccatggaggctgatcaggccaaaaaccactactggtatcttcaagttttctgtatttatgctccttaagtaaaaatgccagtaaaaatgtgcattcactgctggtgaggatgtggtttgaaagtggcacatataggccaggcacagtggctcacatctgtaattccagcactttaggaggtggaggtgggcagatcacctgaggtcagaagtttgagaccagcctggccaacatggtgaaaccccacctctactaaaaatacaaaaattagccgggtgtggtggtgcacacctgtaatcccatctacttgggaggctgaggcaggagaatcgcttgaacccaggaggtggaggttgccgtgagctgagatcgcgtcaccgcactccagcctgggcaacagcaagattgctcaaaaaaaaagtggcacatatagccagtggtcacacacactggcataaccctttgggaaagcagcctggtagttttggcagggggtgaacatgtggatttgagtccctctactggggttcaagccttcagtctgccagttactgcctgtgggacctgggcaagttgtttaacaccatggtttcttcatgtctaagactggagcagcttcctcaaattattgggaatgaaattgcgcttataaagtgcccagcacggccgggcgtggtggctcgtgcctgtaatcccagcactttaggaggtggaggtgggcagatcacctgaggtcagaagtttgagaccagcctggccaacatggtgaaaccccgtctttactaaaaatacaaaaaattagctgagcgtggtggcgggcgcctgtaatcccagctactcaggaggctgaggcaggaaaatcgcttgaacctgggaggcagaggttggagtgagccgagattgtgccattgcactccagcctggtgatagagtgagactccatttcaaaaaaaaagtaaaaataaaaataaataaataaaatagagtgtcgggcagacaggagacaagagttcactgctattagtagaagtgataggtttcaaaagccataaagccttttgtatggcttggacctagtaaagacattgttgaaaatgtatcctaggaaaaataattgtttaaaaaattgggggagtgctggatgtggtggctcacacctgtaatcccaacactttgtggggctggggcgggtgaatttgagactggcctgagcaacatagcaactccccatcgctacaaatactttaaaaatcagccagatgtgatggcgtgcgcctgtaggcccagctactcgggaggctgaggtgggaggattgcttgagcccagtgtgtgggggttgaggaggcagtgagctgtgttcgtgccactgcactctaacctgggtgacagagtgagactctgtctcaaataataataataataaaataaataaacacataatttaaaaaaaaaaaacaaggaaacagatgtaagcacagaaggaactgcagtgtccaattccaagccactgttcagtgccaccgtatctgcagaagatgctaccattgcaaagtcgtaactgtgaaggctgtagagtaggctaagatatgctcagtgaaaagaaggaagcaagctctgggcactgtggctcatgcctgtaatcccagcactttgggaggccaaggcaggagaatcacttgaggtcaggagtttaagaccagcctggtcaacatagtgaaaccccatctctactaaaagtacaaaaattaaccgggtggcaggcgcctgtaatcccagctactcagggtgctgaagtaggagaatcgcttgagcctgggaggcagaggttgcagtgagccgagatcacaccactgcactgcagtctaggtgacagagcaagtatctgtctcaaaaaaaaaaaagtaagcaagcaaaagcaaacatagcccgcttgcatacacacacacacacacacacacacacacacacacacgggcacgtccacacacgtgctctggggacaaggatgtgaatgtaatccatgcatgctggtgggacagcatgggtagccgatttcctggagggcttagatggggtttcttttttatgatttcagttattctaatcctgcctgtgcaacgggagatgttttaaattttcaaatttttgtttaaatggagttttctcttgttgttttgtttgtttgtttgttttaaagatgagggagctcaaattcacctaatttgtccactggtctccaggtcccatcagggagggcactgtggaccggtgatggggaggctgaaccacatacctccagggctcagatctgggggagagctctggggcacctgcccagccatgcctgtctgtgagaaacaccccctcagcaccagtcacagcgactgggccaggcatgggtgcctggactttgctgaccgatcagaaacccctaactctacagccccaaccctgaaggccacagtggctctgggaggcctccaaggaggccacgaggagggtgccacgtgaggcccaggcaagctgggagggagctcagcccgtgtgaatctgttgctggaaaccaaatgtgccctgaggcaaagttcctgtttccttccccaaatccgagtttcacccccttcactctcaggcttccgggtagaaaaaaacctctcccttgttccctcgccccacaaacaccccggcagatggacacctcctggcccgccggcctctgtacccctccgaaatgggagtaccgcagcatcccacaggagcagccgcgcccacctgatgagcacaggtgtgtagagcagggcggcgatgggagtcacgttgatgcccatcagcattttgctgtcgatgtcgggcagccccatgttgccatacttcacctcgcggtaggtctcgtcgtagtgcaggatcagctgcatctgcaggaggcctggggacaggacagagagcggcgtgcagggagcagcctagctttgggcgccaccgagcagaagacggcatgcaggcctcgcagggagctccaatcaccgaaggcattcccgctgacagcgcccctcaggacagcggggttcccgggctgcgccacgccttctgccagcccgcggccacttggccagctaagcccagacccccacccgccttgctccgccggcctccaattctgacggtggcaggtctgtccgggagcccggacccccgtcccccacccacaccgaggctctggctgggacccggggacgctgcgctacttgaccccccaaccccacccccgccgcggggggccgtggctgcagctgcgagggcagcggaggggaagtgagagcgggcgggaggcggcggcccgcggtttctgtttcccgggccgggctgggagcgggcggggcggccccgggtccccgagcggcacctacccaggtagacgccgtaggtgagcatgcccccggcgctggcagccagcacgttcttgagcacgcccaggcgcttgcggcggtagtagcggcgctcctcctcctcctcgttgtagttggggtacgcgcccaccagctcgtccagctgcgagccacgcacgccgctcgcacccgcgatcgcgccccgaacccgtgtcccccggtgcccgccgccccccggcccgccccgcccccgccggggggaccctggcccacaggggacgcccgcgcctcgcactccgggtccccgctcaccggggcctcgggcccgtccgggaccccgagcaggtcctcgtcgccctgcggccccgcagcccccgccatcgggtagagcggcggctccgcctccatggcccgaactactgcggactcgcggcggtcgccccggagtccctgcgaccgcccggccacttcctcccggcggccgggacctgcccccgccccgccctgtcccgccctgcgggccgcctcctccaggacacgtgtgtgtgtatgtgtgtgtgcgcgcgcgcgcgcgcgtgtgtgcaggggcctgcctgtgtgtgccctctggggtgtgagttcgaatccccactcagccacctcctggccctgtgactttaggaattaactccatttctttgtgcctcggtttcctccgtttcctcgacggtaaaacagaaatacatggcactacccccggggccatggcggaactattgagttaatgcaaagccttggaaaagtgccagggttgcctggctcccttaagctcccctcagggttgcctgggtcgtccccagccccacctccaagcctgctgttacagctcatcaaagagcactgcagggacagtagcgtcaccacctggaccccacctcccaccaccggacgctacagccagagcccacctcccatgtccccatcctgctccagtttgggctgtgcaaatgggagcttgagtgggtcctgggaggtggagattgtgatccccactgaactacatgggggaccctgccacaaccatgtagtggggcccagagccacctgcccccatcctgctgggcactggatcccgggctgcagcgggagcctgtggtggggccgacactccaaagcactggctaccaccgacctggctggagccacggggccacttttgaaaatatccagattctctcccctgggttccttctggtttgaatgctcttcctgctgcgcctcccaggtggcttccttcccactcagctctcagaacaagagaccatccctgcagagaatgcagtcccttcacttcccttctggttttccatgccctccctgtgcacccccctccacccactgctctttaggtacatcctctcccaaatgcagaggatggcattgggcacctactgagtgatcaatacttgtgactggatgggtgcatgagtgactggatgacaaacacctcccaccccgcaaggattgctgggaaggtggggggaggcgtgaatctgcagtggcttcaggcttccaggaggtagaactttctccaggtgacgatgcccaagtgcagatgtggggaacagacaggtggattcatgcaggtgggtggctggaagtgggagacaggaaaggagccgaagagagggcagggcccgaggcgcaggggcagggaggaggtgggagagtatggctatggcgggggccgttctcagatggcagacaccagcatcattacacagtatgatgagaaagtgcaattctcctgactcagccttgtgagtagctggaattacaggcgtgtgcccctacacccagctgatttttgtatttttagtagagatggggtttcaccatattggcccaggctggtctcgaactcctgacctcaagtgatgtacccgccttagcccccaaagtgctgggagtgggccccccgagcttctcaatttccctgagggaccccaaacttctggggcctggtgcaatctcttcctccccttgttcctctgggcctgggggttgtggcggttgctatggttgcccatcctgggctcttccatcacctgtgctgtaccaccaattccctgcactcaatgtctcctactcaaaacacctggagagggtcgggcgctgtggctcacgcctgcaatcccagcactttggctggccaaggaggatcacttgagctcaggagttcaagaccagcctcaacaaagtgagacaaacccccccccccaacccatctctacaaaaaatacaaaaactagcctggtgtgatggtggacacctgtagccccagctactcaggaggctgaggtgggagaattgcttgagcccaggaggatgaggctgcagtgagctgagattgtgccactgcattccagcgtgggtgacagagtgagacctctcaaacaaacaaacaaacaaaaaacaaaaaaaacaaaaaacagccctggaggcactaaaccctgactgatacacctcctctctccagaaaggatttttttttttaggtggtttatggagctgctcttggggagcctggagactatctaagaggctgatagggtggcccagataaacacaccagggtgacctgcgggacagagatctgagcagggccagcacctccaccaacccatccaggttgcaacagtgcacagtcacatccccaggaaggggtggccagatccccccgtgctcactgtttgccaatgcttttctctataataagcctttactttcagttctcattatgaaaataatcgatgttccttgcagaaaagcaagcagaagagaataaatattgctctcaactggaactccctgaaacaacctcttggaatattgttgccccgcattgcactgacacaggagcgtgctgggcagcccacgtgattcccttcacaccacttccctggcatggatgtgattccacaatattttaaacattaaagccaatggggatgatgatcactgagtctggctcacaggatggtgggaggtccccaggttggggtgtgccaaaggctctgcccagtgcctggcacagcaaatgcccaggtggctgctgctttccactgagacttgaggctcctgagagttggtggcaaagggctcacccagagctgaagactccagcccattcctgtgcgagggctccaggcaccttggaagcaccgtgggccggggagccaggccaggctggttgtggatccccatgagtccttgtcactgtgtggcccagctggaaagcatggtcaataatgtctgggaattgtgaaaattgtgtgaagtgtctgcacacagtaggtgctcagtaaaggtttgttgagtgcgtaaatgaacaagtgacccgcattcaccgttgcccgtgagttctgactgtgtcctgggccctgggcccctacagcctctaactttgcctcttcaaggagccagggtgggtccagccttcaagactgccagggagggggtgggaggcagggccagggcctcagggccaaggcctggggcagccacttcctcaggagggcaaggagaggggcaggaggacattcacatgctctgagcgcctactgagaaccaggtgccctgtcggtgccttcaggtcggctctcgtttcaccctcgcagtagccatgtgaggcaggcagagtcagcccccattttacagctggggaaactgaggcccagtgaggggacgtttcttttcaaggtcactcgtgggcagatgaggcagtgagatgctcttgggcaggtctgaggccctgtgagccaggctcaggggcgtgtttctgagaagtgagggaatgaatgaatgaattatgaatggatgaatgattccacctgatgccatgctcatgccctgcccacactcctgtcctagagtctggaaggtagctctcagacccttccagagggggccgggcacttggaatggtcacagttccgggcccacgtgcatggaataacttgtttcagcctcacaatcacttatgtcccattttacagatgggaaggcagaggcacggggggttaagacactaacctaggtcacacaggtaagtgacaggaccaggatttgagcccagacctcacacttaacgccctccatgccaggtgctgagatccatgcctgccgaaccctctcattcacccacagatgcccccgggactgtagtcagccccattctcacatgggaacactgaggcccaaagaggcgaagcgtcagcccagcaaggaggaggcagggcaggcggggccgcagctgtctggcccggagccctgagcaacccctccacccactccccctggctggcctgggccttggcagacctcaccccagagctggctccaaaagtgagtcctcctggtgccctacccagagggctccccatttaccctgggctcctcaacaaagatgggactcccaggccctactgagcctctggagctttgaggagtagtgaggggcacccaacccagagtggggagggcccagccctcctgggaggtgtgtggcctcccttggggggagcctcactcccagggaaggctaggagttctgtcccgggaggacaggcctcttcgggggcctcctcccaggttgctcctgcattcatgacaagttcggcccctgtgagttgggggaaattcttcaacagctccctggccagggaggggaccctcgggatcctgaaacacccctcccacctgccagtacccgccaagatgggtccctgatttgctgtgtggccttagaccagtggctgccctctctgggcctcactcccagctgagacctacaggctcagcccctgcccagccctgcctggcacccgctcaatctggctgagctccagagaatggcagggctgggctgtcacatgctgagccacgtgactggcagtggctgggggctccatcccacacagaggacaggggctctgcagtccttcacccccaccctaactatctaatcacgggccaccggtgtgggcatggtccagaagacctcaccgccctcccaggtaggcagggagctggcgggtggggggggccatgatgagcacctcccaggtgccacgttggcccagaggccccggggccgggagctacggaggcccagggcaccagggagatggtagcagcggcaggcccaggaaggggcatagaggaggctcttcctccacacctgtcaccctgtcccctgcctgtccacacccacagcagcttgcacatcatccccacagcacgctggctctgacaggtgtatccggggcgggctgggggcaggcagggacaggcttaggcacagctgcctgtgccgaacttgaggaagatcgggactacaggaaccaccaaggcgacacgtggcatcatgaccacggtcctaagcagagaggcaggcactcctcctgggaggcagaggggacatccgaaacgggtgcagccccagctctggagcaagaagctctgccacacacacgccccatgttcacatcccaccccctctctgcccccacttcctcgtttgtaaaatgttagatctgcagaaagacaggctctatgaatggggcggcccatggggtggtgtggaggaacacggaagcacagggcgctgggagaggagcaggcatgaggtatggtccctaagatggtatttctagactccagccacctttgggtctgacctctttgttttgcagaaggggaaactgagtcttgggtagggtgtagcaagacaagccacagacaaaacacctcagacactggattaaagaaggaagaggtttattcagctgggagcatcagcagacttgcgtcaagagccgagctccctgaaaaagacattcttggcctttttaaaggcttacaactttaaggggtccacgtgaaagggtcgtgataaatcgagcaagctcggggaacgtgaccgggggctgcatgcgtcagctaacagaacagaaagttttgcagtgctttctcatacaatgtctggaatttacagataacacaagtagtttaggtcaggggttgatattattatcacttttttttaactaccagggccaggtggtggcgccaaggtcttctggctatttctcttacttctgtttttttctaactttttgccttctctctttcctcctgtcttgtaaaccaggcaaggtggtaggaggagggcagcaggagtagtagtggtcttattccttaggggaggcattgagggaaggctgggagtggggggtcgagacttccttgctattctgggccataacattccacataatattataatagaatataattaatacaataatagttccccaccccacaccgggattcccagggcccactgccccactcctcctcctcaggctggccctcagctcagtgctcagccctgctgcacagcctctcctcctcctcctcaggctgcccctcagctcggagctcagccctgctgtgtggctctagcctggcgccctctgggcgttgacttcttctctgtggtctgggaggagatgtcgaggcccccgagggaggcggtggtgaaatcttggcttgcagcctccagcccgcccagagccagagtcaggcacgaggctagggcaactccgccccacccctcccccggggactggccctgcgttggacatttcttaacagcagggccaccaggcagagcgggacagccaggaggaagggcagcttggcagagcctcaggtagagtatcccggggaggctggggctgtagtgggccagcagtcgggccagagtccagctcagcaactccgggttacaggcagcccaggcgggcctagccaccggcagctgcactcagaggccactgtgtcctggctgagctcatctgcctgcctgctgggggagaaagcggaaggaggagaggcagatctggggagtggcagcgaggtcccgggcacccccctggccagcaggcacccttccgttgtccgagctgggttgccaccgcctccttttcctgggattcccggacaccctccaagggaaccaagggaacagctctgggtccagctgccccaggaaggactgtgcgccccttccccacaggggtcaagtatcccttccagcaacagccgtttcctgggcaccagcctgcatgcccagtgctgatgcagggatgtggccatgaatgactctgggaaagaatcattcttagcaatggactttgtcagggtccaagaaaggagtggccagccagccccgccccgcctgcaggaggcacttctcatcccgggaactgtgccccatcagggagccgaggctgttcagcctctttgtgacccggggctgggttggcccgagccaccaatgaggggatacgctggtccctggctccccaagggaggggctgctgagctttgggaggcctcatgaaaatccagcttaaggccatcaaaagacaaaatgacaacacatttagttatagatcaaattggcttctattcatgattcgtgaatccggacagcctccattctacaaaatggagtgagagctcccaccaggcagtggcagagcagggggttcataaggcagaaaggaggaaacagaaaaataggaaacaccaaaccgcctaataccggatcgctgcagactgcttttttctaagcggactgcttttttctaaggggtaaggcagaggggacctgatgatgccggctcaggtggactggaatctcctgcttcccggagaaactggtctgtggttttgggctctgtctgcttccttaaagcttcggtttgatgatgtggcatttggcatgagtgcctccattttggtttggtctggtctgttggggcctagtacaggagctcagttcaaaatcacagcctctcatcatgtttgtttaatgaagctacactgcaggagatcagaatcggagaccctgcggtattgggcctgtgggtcccctgaagttggcctagtgatccccgccttctggctgccctgatgggggtcccccaggccctctacccaccatgttcagtccctctgtcaccacatccctgtcctcagttgggtctcagggtgatgtccttgtctccccaacacccaccttggatcaaggccccttcaggcccctgccccaggggtctcctccctgagccctcctctggtacatccgtcctccatggatactgagcacttcccggggtcccagtgcttgaattctcccgacagtggtatgggtgccacaggcagtgcccaattttacagatgggaaacgtgaatacaaagaggtcaagcaacctgcccaaggtctccccactcacacatgtggttgctgcagtttaaacccaggtcattgggcccccagaccatgccatgctgggaggatgctcttagaaggcccatggtgtagatgaggaaactgaggcaggaagaatgagagaacgggcagagcctccgtttccctggaatccaacccacttgataggccagggtgtgaacgagcagggagtccctgcccagggacggtccctgctgtgaggttgggggcagcggctcggccagccattcactccctgtgatatgtcagccccgttcctccccactctgttcccggagcctgtgggcacccacagcgagcacccaggctggcatagtgcccagcacatgggcacctgagtattgtttttagaggcccgtggccttgagaggaagtggctggtcctgccctggcccccaggccagaggaaacagccgctatcttcatcaccaaatgatgtggcaactcccccccaccccagaagctgcaggtctgggccaaatgcacctcaacctgtgatggggggccacgccccagagacccttgggcccatcagcccctggacctcagtggctcagccgcaggaggcaagaggcagtctcagaccccacaacctaagcagtgtggggagtggcagcaatagtgaggagggaggccgaggaaatggaatccaaacagcaagagacctcccctcaccggtcacccctcccacagctggcctaccggagtccacccagccttgggtctgccgtccaggccccagcccagtgtcccttcccccaaggacttggctgcccatccccaggggactgtgagggaggtgggagctgaggtggatagccttctgctcttctggatttgggttttccaatgtgaggagctgggtggtatcaggcaagctctggccctctctgagcctcagcctccatctccttcagtggggtgaatagtggtccctcagtgggcggccgtggtggtgaaatgagcgagggcaggcatggggatcacactccttacaacctcacactgtgggatgagtgccgcgggggtgggcttgggggaccccagcccagtgcctgattcaggagttccctattctgtgtgtccacaatggctgcccagcaccctcgggagataacaggcccaggatccccccaatctcaggcagaaggcggccttggcttctccgcttgccagggtcctgccctgggcactccctgggggcctcagtccagagtgagtgacccgtaggggcaatgccagggctggttgccctgtgggagagatgtgtcctgtggccctggtgagttggtttcagcgttgctaggagggttgctggaatgttccctgcagaactccatcccccacagagctcccggcccacagtccaccattcacgttacgtgccttgcatttttgtggtttctgcagagattcttacaaagggtgagagaggcacaggcgtggtttgcctttgaccactggcagaagtctgaaggtgagagtagaatggagaaggacccaggagagtgcggagttgagggagataaatatttgcaggctacttagcaaaacacccagagctgacctttgtcgagtactttctgtgggcacaacagcaaatgttttatgcagcgtgatgtcatttaatcctcacaatgacaccaggtgccattagcatccccatttcacagatgaggaaaccgaggcagagaaggtgagtgatttgcccaaggtcccacaaccagtaagaggcagagcccggagacaggcctgatggtggctcgagaggctcgttcttggctcctgggtctcagtcctgctcccgtgacgagccatcccctatggggaccatggtgcctgtcctgtgtgcgggccactgcccagcttctcccaatcagagcaggaagatggtgggttcagcctggccccacaatcactccagctgagggctggcctggggctcctgaccaggctctcagtagcacactggtccagcagggccatcctgcagaccggagcaggtcccgccctcaaggtggccacttaacaatcacccacagccttgcgctcaccgatgctgggccctgggctcagaaccgactgtgtggtctcatcattagctggcaggtgccatcattacaccggtaacatgagaggcttcaagcactaggtctcaaataagtaggcacagaggggcctgcctcccagtctaatgagggggaaataagggagatgtggacagggttgggaggtgggtagagtgtaaccagacatttatcacatggcacaactcagaacgctggggagcagagtcaaggggccactgtgacagtggatgagggcataatctgggtgggctgcctggaggaagcatcagccaagctgagatctggaggaaagggactcggagagggaaggaggaaagggtcaccacgggtccttggcaccaggccgaggaacgagtgcgtcagagtgctcctccgatgaacttcaagtaaacaggcagggctcgggggaatgtctaggcccctaccctgcctgccagctctggctggcaccagcacggaggcaggaacgccctctcccccgccctgatcctctcccccacagctgtttctgcctcccagcaccacagccccggcagggtgggcagcagggcctccaggaggcccgaggtgttctccccctcttcctgaggaagctgaggcacagggagaagaggctattgcccactggcctggcctccctgggcagtgcccccaggctggggacagaggaagacggagaattctgtgtctggagtgctccaaggtggtggccatggtggcagtgagtcaccccctctactcatcaagctcctgcttacaccattcagactggcaggggtgaggctgccccgcctccaggaggggcatcagggcagggcagaggccatggcttggggttaatttctgtgcggcaggaagaagcatggcgctctgcctgcctgctcaccctcgggggctgtggtggagcagctgtccccaagcccacacccagtcctgcagccgcctccaggtccatggcagaggggagtggtgcgagggtcttcatgtgtgtctgggagtgctcactgttgggtgaaaggggttgcaggcagcctcagtccctgtggggtcatctgagtgggtccctgtgtgtgtataaggtagaggtgtctgcaagcccctgtgggtgcaggcaggtcaggggtgcccagaccctggggcggctgggtggtgcccatgaaggaggggcagccctggccacccagttcatgccaccccatctggcaggatggacccccttggggacacgctgcggcgactgcgggaggccttccacgcggggcgcacgcggccagctgagttccgggctgcgcagctccaaggcctgggccgcttcctgcaagaaaacaagcagcttctgcacgacgcactggcccaggacctgcacaaggtgggctggggttgggggtatgagagggtgcactggggcaggggggcatggagggcagctgggacagcaggggatgaagacacctgcgccctccatgaagcggggctaaaagcagctcctcccctaggccagagccacccttgcacattcatccagtcacttatttctgtattcatgcagcaactatttgctgagcacctactatgtgccaggtactgttctaggctctggggatatagcagagaataaaacacagttcccatgcctacgaagatgaccttctatcggagacaataaaacagcaaataaataattgcacagcaaggccgggcatggtggctcacacctgtagtcccagcactttgggaggccgaggtgggcggatcgcttgaggccaggagttcaagaccatcctggccaacatggcgaaaccccgtctctactaacaatacaaaaattagctggatgtggtggtgggcacctgtaatcccagctactcaggaggctgaggcatgagaatcgcttgaacctgggaggtggaggttgcagtgagccaaggtcacaccactgcactccagcttgggcaacacagtgagactccatctcaaaaataataataaagataataattacacagcatattgggttgaaatatgtgccctggagacacacccagggtgaaggggagagagggggccaggatcagggtgctgttgtatatgtgggggtcagggaaggtttctctgagaagggggctttagagcagagacgtgaagatggaggggaggctccccatggatgctggggagatggcagcgggcacagcacgtgcaaaggccctgaggcaggaggtgctgggtgtttctgcttgaggagcagcaaggaggccagcatagctgtcgggggtgggagaggaagaaacagcaaagatgaggtctggggtatgggccacactatgtagggcctcggaggccgtgaggccttggccttctctctgggtacagcaggcatcatggcctctgtctagaccctgaaggcttggggcctcagcccctcccaatcccagtggcagccaaggcagaaccccaagaaacacacttcccccaacccctcacccatcagggcccatgcacctgcctgcccctgcctcaggacacctgcccctgcctcaggacaccacctgcccctgcctcagcacatctgccccaggggctgcccccggctcctattctctggacaaaatatctcctccctttgccttgaaggctgtagtgttcagaccttcccccagcccattgggctccctggggactgactcccccgccaccactgagcttctgccaccggccgcctgccggccttcatgagacttgacctgacgtctgtctggtcccttttctcccttcggctctgattccacctcctgccttcccatcccagctgcaggagcggggccctacaaaggcagcagtagcccagaacattcaacctggtccctccctctggacctggtcacccccctgtccccaccctcagcaggcagcatctgcccagcgtcacgtgcaccctctcagttaaccctttggtgaatctggttgggcaaccacacccagtggcccccagaagaggctcagagagagtgtgttcttgcccaagggcatgcagccaggaagagcagagccagagtttgaacctggctcaaaatagcccagtctcccaaagtcaggtcccaggtgacctaggaggtgtggcgggcaggccaccaggctcatggggccagagcacaggctgtgggaaagtccgtgtggaaggcaccttcccccagcctcagtggctaggaggtgccagtgggcgtggcgtcttcctccctcttggggctcagctgtagccctggccttgcccctggttcgctgagtgacctcaggcagggcatctccttctctgggcttcgctggtcctctggcccatccagcaccccactggcccgtccccctctgccctgacccgggagagcctgcaccccataacctcaggcgctgcctcagccagggagccagcctggccccagtgtccctgacctgttctccagcggcctgcagcctgctgcctggctggtctctcctcccttggggcgcagagggcagggagcactggctagccgagagcaggacaatgtccctattgattcgggtctcctcactcctgcttagaagcctgacagtggccctggcccctgggctgtgggaactgacagcatttacctaggggtggctgtgcctgtgtctcctgtggaccaatctccaccctgctctttgggagactgaggtgggaggattgtttgaggccaggagttcaagacctacctaggcaacacagcaaggcactctgcaaaaaatcaaaacaaactttttttgaaattaaaaaaaaacaaaaccctaagtcagatcccatccctgctcttctcaggagtccttgcctggctgcctggccccctcaccttgcccactctgcttcttgctaaacaggagcagagcaagcgcacagccacctcggggcctttgcagccgccagggcctctgcccaaagtatgccgcctcccagtacccacgacttgcttgttccttgacttcaggtcactgctccaatgtgaccgccgcctggagacctgcactgaccgctttgtaaaaacagcacacacacacatgctcatgtggatgtatacatgtgcacacctgtgcacgcccacagccacacgctccagcagtctccacccccaccctgctccatgatttccctagcacagccacgtcctaatggagccgtcagcgttctcactttcacatggaacgactgccccctgcaaggtcggcctcagggccggtccctctgtttggcacagagacagcacctcacacaggaagcacgcactgaacatggagtgagtgagtgaacgaatgaatgaaaatgaatgaatgagttgtggaagcaggccctgcctggaggaggctgtgccctcctgccaactctgggaatcctggcccaccctgaccccacccacttcctgcagtcagccttcgagtcggaggtgtctgaggttgccatcagccagggcgaggtcaccctggccctcaggaactccgggcctggatgaaggacgagcgtgtgcccaagaacctggtgagccggccgggctgaggcgggcagggggctcaggggatatttgctcccacagggtggcccctctgggtgggagctggctgctgaggggccggggtgctgagcacttaatttcatccccggctcccggcccaggccacgcagctggactccgccttcatccggaaggagccctttggcctggtcctcatcattgcgccctggaactatccgctgaacctgacgctggtgcccctcgtgggagccctcgctgcaggtgagagctgggcctgccccttccggtcacccttctccgctcgaggcctcagggccacccatggatcccaggaggacatgggagaactggcccaggtggcaaagaggactgtctggtccaccgtccccgggctgtgtggccctgggcccgtcatgttacctctctgaaccaggttctgcatctgaaagtgggtgaggctgatgcctgccctgcaggtgtgtggagaccaggagctggctacgcctcctccagctctctccctgcactgccctgcagggaactgtgtggtgctgaagccatcggagattagcaagaacgtcgagaagatcctggccgaggtgctgccccaatacgtggaccaggtgagcagggctgccgggcaggtagagcgggaacaggcaaggctcaagggctgggcagcccctggcatggaagggcctgtcagtcagacccgagtccccacctcaatcctgcctcttctgagttgtgtaaacttgaccaagtcaccgcccctgtcagcctcagtttccctctgaggagcagcgagggcagcctgttgcccaggggttccgtgtctgcctccacctggccctggcatcagcccctccagcgccagctggactccaagctgggcctgccaatgccagccaaccttggggagctcccttctccccactttgcctccacccaaccctcctagagccctggctgggtcaggccaggcggggtggaggcagggcagggtccaggcagggcgggctgctcccttgtgttctcggagctggggtcccagaaggagcctcacccatcccgccttgcagagctgctttgctgtggtgctgggcgggccccaggagacggggcagctgctagagcacaggttcgactacatcttcttcacaggtgaggccgggacgagggtcgggacaggctggggtcggggaggacagctgctcaggggtcctgtccctaactctgggagtccacagggagactgaattctcctctctctctctctctggaccaggctgggagcagtcctggacccccaggaccccttaggaagggatggagtcccatgtccagggccagcccactgtgccaaccacagcgtcaggaaccatagcctctgcccccactgtccccagaccctcatacgtgaccctgctgccccccaggctcttagacaccaccctactggtgcccacagccctctctgcaggcagatgagggactgggcctcagtgtcctgcccagggtcaccctgctggccaggatggggacaggctggaatgtgcacacaagcccttggagaaatccacgccagaggtcactttttttttctttttttttgagacagagtcttgctctgtcacccaggcagtggcacaatcttggcacaatcttggctcactgcaacctctgcgcctcctgggttcaagtgatgctcatgcctcagcttcccaagtagctggggtgacaggcatgtaccaccacgcccggctaattttttgtatttttagtaaagacagggtctcactctgttgctcaggctggtctcgaactcttggcctcaaccagtcctcctgccttggtctcctaaagtgcagggatcacaggcatgagccaccacacccggcttcgagtttttgagctagggaggggcagagggagcgagaggaagacagtggtgctggcaggcgagtctgcgccttacaggtcgaggcagtcgtggggaagggcctggcaggattgacctggccgcctcccagcaaaggcaaaggagccctggaaggaaccacagagcccaggaagcactgtgccaggatggggcaggggtgagagtagagaaggcacagtggctcctgccggctttaatccttgaccacaagggggagaaatgccagggccatccccacagacgcagcagcgtggtccccgagtcaggtctggagaggaggccttgaggcccagacagggctagggcagagaaggctgtgtgcatgcggagactgctgggcccctggaggccagcacagaggagaggtgaggccaagccaggcaggacatggggacgcctgcatcagcctgggacagtccacctcaagggtcagaaaaaaagggctgggcaggtggcagaacttccaggtttaggtttagagaagagagacctgaatgccgtagacagagctggactccatccttgggtgataagggatccccgaagtttccaaaggagatgggtggggaggggttccatgcagcattttgcaaagagtcccctgcagggtcagccagggtcacaagcagaggcgggaggagccaaggggtttggctcagcagggggaccctgggggccgatagcagccgtgcaccattccctcctgagactctgtgcttaggggctggtcctgatgaaggatgagcagggccctgggctgcagggtggcagtgaggaacaaggaaaggccaggcgagggctgctgcccgctgactccaccacctctccagggaggagcggggccgtgggctgggccatcccgcctggtccaggtcactgaacggccactctggtttccttccatgcccagggagccctcgtgtgggcaagattgttatgactgctgccgccaagcacctgacacctgtcaccctggagctggggggcaagaacccttgctacgtggacgacaactgcgacccccagaccgtggccaaccgcgtggcctggttccgctacttcaacgccggccagacctgcgtggcccccgactacgtcctatgcagccctgagatgcaggagaggctgctgcctgccctgcagagcaccatcacccgtttctatggcgacgacccccagagctccccaaacctgggccgcatcatcaaccagaaacagttccagcggctgcgggcattgctgggctgcggcgtgtggccattgggggccagagcgatgagagcgatcgctacatcggtgagtcctgctgcccctaccacagcccacctgggccaagacccctcctcactggagggcccaaggctgggccacaactctggacccgcgcctgaaacctggccccactgccagagcccggccttgagccacagctccagtgccatgattccgtctctgtgcttctaagtctgtggccctatgaggccaaactctggtccctcaccttggattcgctgagctcagatcccagggctccagggctcagcgtgctaagatgaactcccatcccaccactggctatcctgaaaggctgtaacctcagattctccgagcccacaatccccaggttctaaactccgagagtcccgtcctgagcccccagtctcctgggccgtacggctcagcagctcatgggacactgcggcgccaacattctgggacgctgttgcctcatgaactccaagggttctaagatcccatcacccctgactgtgagaccaaggtcgggggattctctgtgtcccacaggccctgagcaggctggggaagctctagagtcccttctggggggctgtggggagactttcttccctaaacactccaaagcctgaagccttgggaagtcagaccttgggatcctggcctagagccctggcctgtggccctgtccccacctctacccccaccctgggggcggtcctgactgtggccccagggctgagctgtctctggtgcctgcagcccccacggtgctggtggatgtgcaggagatggagcctgtgatgcaggaggagatcttcgggcccatcctgcccatcgtgaacgtgcagagcttggacgaggccatcgagttcatcaaccggcgggagaagcccctggccctgtacgccttctccaacagcagccaggtgggggtgcggccgggctgggcagggtcaggagcccgcagtgggcagcacaagtggtggcagcagggggggcaccaaaatccagtggcttcaggactttgggatggtggacctcttggctctgtctctgcccactctcctggaagcagctgagcctcacccaccccaaccctgtccccagtctgggccccactctcctaggccttcagtgggcagcttcctggggtatgggccttctctagggtccagtgtttcctctaggtcagcccctgcctttgtccttcttacacatcggggcctggtggccacatgacccctcaagcctggctctgaaggcacaggcaacgtgtcggggatgacccaaaggtgcaggtccaagaatgagccctgatcccctacccctgcttaagctgcagaggcagcctgggaggcccaaggccagagtcctcagattaaaaaacaccaagaggtaccagcagtccctacccaccccgcccccttccccggccctcagccagttcctcgattccctccacttgaacttttttttttttttttttgagacagagtctcactctgtcacccaggctggagtgcagtagcacagtcttggctcactgcaacctctgcctcccgggttcaagcgattctcctgcctcaacctcctgtgtagctgggattacaggcgtgtgccactatgcccggctaattctttgtatttttagtagagatggggttttgccacattggtcaggctagtcttgaactgctgacctcaggtgatccacctgcctcggcctcccaaagtgctgggattacagggatgagccaccgtgcccggccacttgaactttttttaaataaactttgtattgggaaatacttttagatttacagaaaagttgccaaaatggtacagagagttcccatgtaccccacacctaatttcccccatttaatggtgcttagatgggtcaaaactaaaaaagtgatggcagggctgggcgcggtggctcacacctgtaatctcagcactttgggaggccaaggtgggaggattgcttgagctcatgagtttgagaccagcgctggcaatatagcaaaaccccgtctctatgaaacatttttttaagattagttgcgcatagtggcgcacacctgtaatgccagctgctcgggaggctgaggtggaaggatctcctgacccataaaaaaaaaaaaaaagtgacagcagtgctttactattaactacactctagactttatttggattttgctgtttttccactgacatcctctttcggccccaggatccaagccagggtcccaccttgcattaataaccctctcagcttaaggagtgctggacaggtctcctgtagaacatccccagcctcaggtcatctggtgtatttctcatgattaaagaaaggttactggttttaggagagaatcccacagaggtgagcctgcctctcacaccacatctggggcacctgagatgcacacgtggctagtgagtggaaccttcactaccgggtcaggacggtatctgccagggtttccctgggaagctactattgtttgtttctttattatttggaagcaagtctctaagcctaccccaccctcaccaggtggaggtaattaagctgtatgctgctctatcatattgttagttattatctagttattttatacattcttttcttattccatttgtggtttggtggaattttgttgtattgccatttgatacctttctcttcctcctttgtatgattgttttatagggcctgtgagttttgtacttttgtgtgtattatggcaaataccaacttgtttttatgttaagactcctttgagcatttcttgcaggactgatctagtagtgataaattcccccagcctttgcttgtctgggaaaggctttatttcttcatctacgaagcatagtcttagctggataccgtattcttggctaacagcagtatctacatctatttcctggaattctgtaagaaagattcatctcttgaattgtttatttaggtcactacggactcaggtatatttatttgactccaggggctgtaatccaaggtcgtgtggtttgtctgaggctcgggctcagaagcccatgtaagatgtcccagcctcttgggttgtgaccacctccttcccctctggtgctacaagcagctccaggctcatcttgtatctcccctgctccaactccagaagcagccattccttcaaggagccctgcttcatctggatactttcacctttagaaaactctacagaggttttttgacagtggagtcatctggcttcaaacttttctgaccacccagaactgatcccaggacacacagtcacacctaagacacaagtcatgcacaaggtggcttgcccgtactacctgggacgccctctgctgccttctgctccatctcctccatctgctgccactgccattgtgggtaatgctggtctcatgccatgaagtgacgtctgaatccactgggggcagtccgctttccccacatcagacaagccctgacccagctgtgatcagaggttcacggtgattgcaactaaatatactgaagtttttgtgcagcaactatttagtgtctaccaatctttttttcctttcagtcttcaaataagtctacagattgaggaagaaggtccttctcaaggaccttcaagcaagggccaagcttctgtttctaaagtgcaaatctgaccacatcattatgttttcatgtccctgtgttcacaccacacagctcttcagcctccactctgtctgcagtgccctctttgcctgaacaacttctgtccctcccagtccctccactcagcaggcacatgacacccctctcctgggatgcctccctactgtccagtactgccctgctgccactacaccctccatgtccccaagcaacactaggtttcctgcccctacccccagccctaagagtctgtgccatcagcatggaccacacatgagcagatgtccaggaaacatgtcccaagttggaagcttcatgaggagctgctacacaaccccctgccccacctgtaccatcacaggcccttcagctgacatggtggcctcagaccctttctgaggcaagatcagtgtcacagagtccagcatggaacaggctctgggtcctgaggatcctgatggggctcaaggcagcctcacgcacatcctgttctctcccaggtggtcaagcgggtgctgacccagaccagcagcgggggcttctgtgggaacgacggcttcatgcacatgaccctggccagcctgccttttggaggagtgggtaggtgcctgctaccctgcccttctgttaccatttggtcaaattgcaatagtgttacctgcatacatttctgccaaagcaccccagccccacctcaatgtagagggacaggcaaggaggcctcaccccagaacccgcatcctgctccccaccccagagggtctgagtccaatctgggcaacacagtaagaccccatctcaaaaaaaagtctgtggtggaaccttctagaccatctctgcacagacacacaatttagtgaatttttaaaaataccacacaactatgatcacactgcccactgcgatgctatttgctcttctccccaacagcatgacctggtgtctgcccctcagcagcaatgccgccggtgtcctttactccagggcagctgctcctctaaccccatcccccctccagctctcagtacaacacctccccaccctgagaggcccggatgagtgccaatcctccaccccccagagcagccccgatgccactgcagagtcctggcctctgagtcaggaagcctcagagatggtcctagcaacacgctgaaggccctgtggcccaggtgacatctcccctttctgagcccacttcctcctcagagaacagtaggccccgagcaggtgacaggcagtcccgccacctgtccacactcagcaccacagtgaacgatggcagggccaggcaagctgcctcaggtgggtccatgcccttcctggagggcagccaggggcacaacagtgcctgtgctgctgtcctggctcggctcgagtttgggcggctgcccccgaccccacctagctgcctccccagccccagccccagcctcctcaacccgcctccctgccctggaggagagtcggggctgtctgtgggcacatctgaccctgctgctccctcaagaaagcctcccccagctcccaggcccccgagctgacccttcttggtggccgtggccccaccccggcttccccacctgctgctcccacagcctgagctctgcccaggtccctaacacaccgcatggcacccacctctaaggctccccaagcctgggtccctcttgcccccacccactctcttcgtcttattaactgcatatccttggagctcactcactgcaggaagccccccagccaaccccactccacccaggctgtgctctgaacgccctggcctggggcctcgtctgcctcccaacctagacgctgaggagagttcactgcacatagcacctactgggtccaggggtctcaacatcccctcaatccccaccacaaccttaggagggaggtacccttgtcaccccacgacagaggagactgaggcacagtccaaggtgacatggattgtttgcagcagggccagagtttaacccccggcagtctgactctggaatccatgcccttgaccaccacccgcctatcttgccctggcatctggcatccccagggcttactgagctggtgccaagctcggggccaagccctttacacacagtgcctcatgatcagcccactggacagatggggaaactgaggctcagaggggagaagtagcccgcctaggccccactgtctgtgactaggagacccccagcgcctgaccacctgtgttctgtgccactgtacaggtgccagtgggatgggccggtaccatggcaagttctccttcgacaccttctcccaccatcgcgcctgcctcctgcgcagcccggggatggagaagctcaacgccctccgctacccgccgcaatcgccgcgccgcctgaggatgctgctggtggccatggaggccaaggctgcagctgcacactgctctgagcccttccccaggcccaggctgtagaccaccatgacagctgtcgcctgcggctggtggagacggggcctgggctcccgggcccgaggaggaaaaggattgccaaggctccagggcacccctcaaagcagcgcctgcctcctccctcctgggtcttccctctccctgcctcagcctcctccctcagccgctcccaaccatgagagccgaggtgggaggcatgggaaacagtgcagtgactcaccccctgcccccgcaccaaccacccatattcaggagaagaggacagacacggcacctctgagtcacccctctcctgtggagcgggcgtccgaggggccctggcatctgactcaggccacaccatggaatcactgcatccaaggccattcctgccctctctgagtctcagtttttccatttgttcagtggagagaattaaccattgatacctcctggctgggtgaggcggctcacacctgtaatcccagcactttgggaggccgaggcaggcggatcacctgaaatcaggagttcaagatcagcctggctaacatggcgaaaccccgtctctactaaaaatacaaaaattagcctggcgtggtggcgcatgcctgtaatcccagctactcaggaggctaaggcaggagaatcgcttgaacccgggaggtggaggttgccgtgagctgagattgcgtcactgaactccggcctgggtgacagaaggaggctctgccttaaaaaaaaaaaaaaaaaaaacctcctgggactgttgcaaggatgaaatgaaggattgagggattgagggattgctgagctggagctccaggtgtcctatctttctcagtggggtggcacggagcggggccgcctccctcttctctccaggcaggtggggctgtggttatgcgatagggtctcccttccctccagcccatgccagaggagcttgtaactctttatcctcatggtgcccactacgagtcatactcttccccatgctgctcatcctcctgggccccatccactcagccaaagcagaatgcagggtttcctgcctgacaacccttctcacctcccaagtcccacttttgaacaagctgatgattctgaaactggcccaatttcctaacaagccggatgcttgagaaacctacatttggacaatgagaggctgctcctgcggcctgcgggccacctcctcttccttggctcctgctttctttttagactatatcaacctacaactttagtcgggaagagggacaggggtggacctgagtttcgtctcctgtctctctggctgatgtcacctgaataaagccttcttccctggcaatacttacatctcagtgatttgctttctgtgcatctagcaacaggactctggaccaaggccctggcgttgggtaacaattctgtaatgctgcaggacttccccaatccacgcaggaatccccgcaggcatccacgcaggaatcacctgatgaagggccagggtcaggtgtgggccaccatcccaagacctcccttctctctagggccagcccctctcctctgagcacctgctgaccagcccaaagccctctccactcctcagcttgaactcccccagggtctccctgtggcccacaggtcctttggaggctcgggcatctgcatgcaaatcccaaaccactgtcccctttgcacacactgagcctgcccttgtcctcgtcctggtctaccatgcgtgtcctccctctgcacgggcatgggacatgccctctgcctccttcctgtcctggcctgcccaactcctacctaccctcagcgcagatcctcccaacacacacatgcaggcagcctcggggcctctgcgggtccctctaccacagcattcccggggaaaggcccggcgtggtggctcacgcctgtaatcccagcactttggcaggccgaggcaggaggatcgcctgagtccaggagttccagaccagcctgggcaacatggcgagaccccgtctctacaaaaaatacaaaaattagccgagcctggtggtggcaggcgactgtggttccagctgctcgggaggctgagaagtgaggatcacccgagcctgggaggtcgaggctgcagtgagccgagatcgcaccactgcattccagcctgagccacagagccagattgtctcaaaaaaagaaaaaaaaaaaaaaaaaaaaaaaaattcgctggtaggaaacataggctggttgagtacgggagtcatacagatcaggtggatcaggcggccgcacaccgcagctctacggcccgggaacgttactaaatactcccatgcctcagcttcccgccttaacgtggtaacacgttactgtagtttctccacgcagagctgctgtgaggattaaaagaggccgcgtgagttgagcatctcgtcgccattaccgtcatcacacgccccccacccaacccggcgggcccaccctctgcacccacggcgaaagcactctttctaaaccacgccccggatgtcccgcctccagcggctcggaggtcttcacttattggcctccccaaaccaacatggcggccccctacaaacttcaagcgccggtctctcctagccaatcaaaagaaagatatttctgaatcccgcctctttcagcagccttgctggccaatcagaccacaccatgaagcatcaatacagaaaagggggaacccgctggcccaatggcagcgtcctacagtgtagcctccgcctcccgattgactggcctgcttggcaaggcaagtagcggcggcgcttcaaggtgggtgttcacgttttggccgtgaaagtcgggcttgggcagcgtggcgtcgggggcgagtgtggtgtccccgttggcgccgccagctctgcgcctgggcttcccctcggctcactcaggatccgcggcctccgtgtccttcaggtgcagcggggagccggctctcagggcgcatgcgccgcccgctctgcgccaccggcctagttagggtcggagatcactgggaaggtggggaaggtgctgggttgggtccctggaactgcagtcagtgatccaaaggagtgggcctgttagggggttcacaggtcgtgggatgagctcttatgagcgccggctaagtgccgggctctggggtgcccttggcatgtacgggctcccctaattcccaagaccaaccgcccccaacccacttcataggtgagaagacggaggtcaggtcacatcatctgcccaaggtcacgcggcaggctgggggacagttccaggagggccttgaagctggggaaaggaatgtggtaccgaggactgttcaggccttgaagagtttccagcagggcagggctgggttccgatcctcggcccacctccttatcgtgtgacttccgacaagtcacttttttatcttttttttgagacaaggtctcactctgtcgcccaggttggagggcagtggtgcagtctgggctcactgcaacttctgcctcctgggttcaagcgattctcctacctcaacctcccgagtagctgggattataagtgcccaccaccacacctggctaatttctgtattttttggtagggacggggttccaccatgttagccaggctggtctcaaactcctgacctcaggtgatccacctgcctcagcctcccaaagtgctgggattacaggcgtgagccaccacacccagccctagcgagtcactcaacaaactgagtcccagcgccttatttgtgcctccctcgtggagtccttgtaaggataggatggcagcgctttccacccctgggcacggttcctgggggaggagagctaacaaagttcgctctcagtgcatgctggcgggggctggtaatgttgtttttggttagatttggggaggatgaagggaggagcagaaaggtgggaaacaggatctctgggagggagaaaggaaggatggatttaaaaggtttcttaggtgaggcagaacttggggtccacagaaactgaattgtagctcagccaagctgaatcagatggaaagctgggaggcgctgggaacaggaaagccatctgtgcctctgacagcaatggggtgcgagtagagggcaaagtgacacatgtcagtggagacttgggatccttgcggtgccagtctcagaagaggatggttcttgggcacaccccaccctccatccctttttatgccaccagatgcgctgcctgaccacgcctatgctgctgcgggccctggcccaggctgcacgtgcaggtaggaccaaagaagcctttgctgggggtaggggagtccagtctcctggtatgacgtcacgcccttctttttgcaggacctcctggtggccggagcctccacagcagtgcagtggcagccacctacagtgagtacctgggtggcctctagcctcaggtgttcctgactggtcctgctggagtaggggaagagacctgagttccagtcctggctttgtcaggggcgttcttctctgagcctgtttccacttttaaaatgattatggtgatggagactgactctgattcacaggggcagggtccatcattgccgaggttagcatgtgtgatctcagagctccctgggtgtgatggggagggggttgccaggtgtgagccatgggtacctgtgcctattgccagtccctggtgaaggcaaaggctcaagccccccacctaccccccttgattcctctttcaagccctgttgggcagggaagtgcgtctgggctccaatggccacccaagcacagggagaggtaggcacggacgggctcaggccagaggcggcctccagggtccttgctgaggctggggagaggtgtggtgagtgtacagcccctttgtagcccagcagttgcacctggaagtgagggccaggctgctctccctgaggctccagggagacagtgtgtgaggcctcttgccatggcctccctgcccgcctctctgcagagtatgtgaacatgcaggatcccgagatggacatgaagtcagtgactgaccgggcagcccgcaccctgctgtggactgagctcttccgaggtgcgtcctgggcatgaggggacagggaaggtgccgggtgggcacggatgcatgggggaggagggtgcccctgcccaccacacccgtgctgcccacaggcctgggcatgaccctgagctacctgttccgggaaccggccaccatcaactacccgttcgagaagggcccgctgagccctcgcttccgtggggagcatgcgctgcgccggtacccatccggggaggagcgttgcattgcctgcaagctctgcgaggccatctgccccgcccaggtgagcccctgccccaaccggccaccacgccagcccctgccactgggagagggaggccaggcagccctaggcccaaaccctagcccctgcttgatgtgcgtccccaggaagtccctttccccctctgagccacttccctcgtgaatgggaatgatgagggcttgttaccagagcacagagtcagtgagttggcagagtgaagcttccagccctgggcaggcgcctgacacacagaggttcccccttggggtctggccaagggtgtgacccctgggcctctgagccatggggtgacacctgaggccatccacgcctccctggatgtagccaccgtttccggagtcctgcttgtgtgcctgttgcagcttcccttccccagtggctgctcccctgaggcccggctttccgttctcttagtgggtctcgtgcttacccgtgggggccaggcctgccagcacgggaacaatatgactcggtcagagctctggtcagacccctgtgtgtgcctggcaggagccccggcagccgccgccgctactttctgtgtgcacagcaacccctcccagtgttctgtgactcgggtggctcctgtccagatcctagtttgtcctctggagcactcccaggtcctccaggccatgagctgcggccctgatgtctctactccagccacggactgagagtgcataggagtgtccccaaacagcagtcacgatggtcacaaccttggcttccagacagtgagtgctgtccacagacagacccggtgctgtgccatgtgtgtgactcacagcctctcctgtaatctccacaacccctcgaggaggtcgaggttattgtctccatctttataagcactaaaggatgagcctgccagccacaggtcccactgtgagttgtggacactacatttctgggatgggggcatatgagagtccttgccaagcacatttgaaggttttcccagccagcccctcccccagcgggctacccaggaactgagagttaggacgtgcccttgagtttgggctgtgcccccacttgctgtgtagctttggggagcccctcaacctctcggaaccttgtttttctcatccatcaaatggagagaagtagatttaaggcacaggattgcacccaacagtgtaggcattcttggcgatgttgcaggttcggctccagaccatcggggtaaactgagtcacacagctgttttggttttccagtgcatttaaaagttagatttagaccgggcacagtggctcatgcctgtaattccagcactttgagaagccgaggtgggcggatcacttgaggtcaagagttcgagaccagcctggccaacatagtgaaaccccgtctctactaaaaataacaaaacttagccgggcacgttggcaggtccctgtaatctcagctacttgctaggctgaggcacgataatcacttgaaccgggaggtgggggttgcagtgagccaaaattgaaaaaaaaaaaaaaaattagggccggttgcggtggctcacgcctgtaatcccagcactttgggaggccaaggtgggcggatcacaaggtcaggaattcaagaccagcctggccaacatgttgaaaccccgtctctagtaaaaatacaaaaattagccgggtgtggggttgcacacctgtagtcccagctactcaagaggctgaggcaggagaattgcttgaacctgggaggcggaggttgcagtgaactatgattgcaccaccatactccatcctgggccacagagcaagacttcgtctcaaaaaaaaaaaaaggatttacactgtactgtaggctgcgaagtgtctaaaacacaatgtatataccttaattaaaaatactttaggggccaggcacagtggctcacacctgtagtccaagtgctttgggaggtcaaggtgaggggattacttgagcccaggagtttgagaccagcctgggcaacatggcaaaaccccgactctacaacaacaacaaaaaatacaaaaaattagcccctgtaggcccagttacttgggaggttgaggtgggaggatcgcttgagcctgggaggttgaggctgcagtgagctatgagctgcaccactgtactccagcctgggtgacagggcaagactctgtctcaaaaaacaaaaacaacaacaaaaactttattcctaaaaagtgctgacccagagataagaagcaagcacatggttggtaaaatgacatcagtgagcttgctttatgcagggttgccccaaaccttcaatttgtaaaactcaaaatatctggaaagcttggtgaggcgaggcgggactgtaactcagcactcaccgcagggtgagacccttagggcagcgggtgctacactgaacaaagcggtgaacagccccctcgtgagagggggttcttggcagatgacgccagcagctgacaaacaggcaaggcaggccgggcacggtggctcacgcttgtaatcccagcactttgggagtccaaggtaagcggatcacaaggtcaagagatcgagaccatcctggtctacatggtgaaaccccatctctactaaaaaatacaaaaattagctgggcgtggtgatgcacacttgtagtcccagctactcagggggctgaggcaggagaatcacttgaaccgggaaggccgaggttgcagtgagccgagattgtgctgctgcactccagcctggcgacagagcgagactctatctcaaaaaaaaaaaaaaaaaaaaaaaaaccagcaaggcagggacgccagcagggcacgtgctgaggagacaggcgcgagcaccagaggtgcagggcggcctcttagccggagtccaggaggcctttgaggggagagggcttctggcagaccccaggggtggggatgagcagtgacaggggccctgggggctgggatgtgacagggcagcgtggcagtgtctggtggcccctcccgcaggccatcaccatcgaggctgagccaagagctgatggcagccgccggaccacccgctatgacatcgacatgaccaagtgcatctactgcggcttctgccaggaggcctgtcccgtggatgccatcgtcgaggcacgtgaggcccccgggtgggagggggcctgaggctcctcagcagggcctaaccaccgtccctgcacctcaacctgcagggccccaactttgagttctccacggagacccatgaggagctgctgtacaacaaggagaagttgctcaacaacggggacaagtgggaggccgagatcgccgccaacatccaggctgactacttgtatcggtgacgccccaccggcccgcagcccctgctgcccaataaaaccactccgaccccacggcctcttgtcttgactctggtggtccagggtggggccgttcccggcctgcctgaggcctgtggtgcctccaactggactaggtcgccacctagtctttatgctctctggagtcctgctgccccagccctgccttcctgtagactccagggccccaccaggctctcatggctagaccacaggccgcagcatccctgtcaccctgcctcttcctgggcgtcttccccaaggcccagcgatgccagaggtcaccacagacctgccgttcccactctcccgggtgtcctggctggggcctgggcctcctgtctcccaagagccatccacttgtaagacgcttaggacttggagcctcccaagacctcaggctgaagaacagcaagtggcagaaactcaggccggggcatccttgctgggggtaggaggaagcctgcttggggtgacagtcacacgagggtgacacaggccctgctggccctgagctggcctgcgtccagccacatcctctttcctgtgttccctacgccagggtgctggcccggccactgctcaccacttcctgctttgctggcccagcgacacggtggggtttccctagggccacacacaagccccttgcccatataatggccaaaagcagcccccctgaacttgtgctaagtactgtggaaggatttcacttcatttgcagtgaggaaaccagctccgagaggtgaaagggcttgctcagggccatgcagggcacatcccataataaaactcagttcagagaccttgaccccccccatctaccatcatttccaaaagtgctttttacaaagcactactttgtaaaaagctacttcttcgaaagaacaagtttcctggcccagtgagtgttggaaatgctccagctgctgtgtgcctgctggcaggtactgcatggtagacattcaaggctctgagaaggcctgcagcaaaaacaccagcctctcccagcccattcccagggagcttttctcaggtctaacacctgggcctccttcctagaccaggcattgccatctaatgccaaagtggccaggctcccgcttgggccccacagcctgtggcactggggtgagaagtaactgcaggaggcgaggggaagcctggagcccgggaagtgtccacaggtctggcccgcagctcatcttggccactgatgaaaacaggtgttctttccaaaaacaaggcaggcgcaggactcctgaagcaccgccggtttagcttttcccagacgtaaccgccgtcagagcgtggcatggagcctgtagctgtgcactgaatacttctattccaagcgggtcagtctttccagctcaccgctgggttctttcccttaccgtggtctcccaggcacttactgctgagaccccactcaggctgtctggttgtatcaggccccgaccctgtcagaacaggcctatggcgcccaaccacaagtcccccaattttctgaggaaccacagctgagcttggctgtgactcagtttccaggcccggctctggggctccacttgtccacccctgccgcagccccacaggcctgtgctcgctgtgtggggcttagggatcaccagagctgaagggcccctggcctccagtgggaatgccccaggcctgtccaaagtgcaggcagctggacggtcgtgagtcccagcttccaggcactaggacctgatgacgcccatggtgctgacctggagcaaggtcacagtgacacccccctctaccccccgcggctgcagctgcaggtggagctgacagctggcctctggccccagggtatctcccagggcctgctgggtgcggggcgctgggcagaacaaggcagcatggcctggccctgtgtcctgctgccagtgaagcaggcccagagtggggcagccacccacccaagggccagagcggggcctctccagggtggtcaagagcaggaaggtgtaagcaccggcgggtttcactgccgcccaagggaggggtcccggaggtgggggagcatcctggggaccccaagcccatgagcctgcgaatgttggggtcccatcagccagaggcgcacaagcctcgaagtgagaggagagcagggtctcatctcctatcctgagctgggcctgagcggagctgcccctgcatcggggccagcatagacgcgcgcggttggcagtggtctgttatccgctcctttctccaggcctcctctccgggattaagcgcctcaggacccgtccgccaggccacagcctgggctcaacctctcccagacttcctggactccagtggagccttgggccgggggcggggcgtccctggcccctccccgtcgtcccgcctgcccggaaaggagtgagcggcgcctagtcccgggctggcgggagtgcagttctgagtcccgcccggcgtgcgcggagcggggcagccagcagcggaggcgcggcgcgcagcacacccggggtgagtgcccctgccggggtctgcggagccccagaatttcctgcccaccctcttccccctgccccggggaggagatcctggcgccccacccagttggctccgtgaatgcagctcagcccgccaccccgcagggtgtcaggccttgcggggggccacggaggatccccaagggaggaggagaaggatggggtgtttaccaacacagcccagcgttcccgggcctggtgtgcgcggagctttccccgctgctgcttccttggagggagggacccattctacagatggggaagctgagaccacacaactaggaagtgtcagagctggagaccagctgggtcatttgactccagagcccaccccatttggaatggagggggcgccagaccctctcctactgccttcccatcatctggaggggagggcagaggtgcagagagacctgctgggttcctggaggggccaggaaaggggcacagggtgaggagtgggctggagcctggaccccagggccgcaggatggaggcgtattcatttacaccataaaagtggctgggtgaccctggctagagcggggaccaagggggacaggggtagggggtgagccagtggagcctcacatgccaggcacgggggctgatcacgtccccacacctttccccccgcccattacaggttgttcccccaccccctgggaagtgctggaaggagcccggccctcgagccctcggcatagtggctgtgggagccctgatggccctgagccaggggtgacccctccccagatccccagagctgattccccacacctccttatttggccagcacagccccaaagggagccaggtcagacacaaccctcctctgagctcaccctttgtgctgggcacataacattggactttacctctccaagtgtcagtggagtcctgtatgaaacaaaagcaccgtaccccctccccaagggtttctccccccagggattagtgtgaggtcgtgtggatgaagggattcagttgaggctctggttatttttgtcacctccctagatcctgtctctgtcaggggtgccacgtcccattcacccaaagaggaagtagaggcacagagagggtgagagacttgcccaaggtcacacacccaatctcagcctgggctccaagtccctctgccctgtggccgggcctggtccttagggatggaacccagccccgctgccccctgccctgcccacctgcagccttgggccatctgctcagtgttccctcgttccctccttctctcctttcccaggctggggctggggctgcgtttccctgtttagagttaagtaaaccagacccaggggaggaagtgactggctgggcaggcggggccctgaccaggcctgtcccctccccctaattttcgagctaagcaactgattcccacagaggggccctgggccctgagagcagtggctttggagctggaggggccccagcatccagggcgggttggaggtggcctggcacctgcccccaccccacatcggccttgagcaaggccccgggcccttccccgccattctgtagtttcacttttgttggtttcaacacctggaaggctgcggctgctgccgggcggcccgggcctcaggggacagcccccccacagcagtgctccctggctagccccagggtacccggtggagatgcccgctcctaccactcagcacatgcagctccacagggagcagcgagggctccagccacccccggggcagccctgggcctaagtgcctgggccagtggggtcctgtctagggtgacggcagcccgagaggagggaggccagagtgaaggtgggggtggagccggtgtcactgggagacgctggaggtaggggcgggggtccccatgggcagagcaagccaggagagagcttgaggtcggcctgagggtgggcttcggggtctcccagtcccactgcttactttctgcgtgacctcagcaccgcatcaagcctgcccaggcctcagtttccacctctgtcagatgggggtggtaacagcagcttccaggattcagtgagtgaaggtgcacaggtgcccgtggttgggaactgtctgtggtctgcccctgactggcccccatccgtgtccacccacaggaccatgggctccatgttccggagcgaggaggtggccctggtccagctctttctgcccacagcggctgcctacacctgcgtgagtcggctgggcgagctgggcctcgtggagttcagagacgtgagttgggtgggcaggcgtgggaagggggctactgccaaggttagcccggaggccggtccaggatggggactgccccccctccgccatagggccctggccccatttgaaccccagcggcccctgccatgggcactgctcatgggaagcccgcagctgaggcccctgagctggctcctccccataccctcctggggcatggggtctggtctgtgctctgatctgcgtcttgtggctcccagggcactccacacctttctggaggaggcagctaaggcctggggagagtcaggcctgggctctagggtgaggagctccctgacccccttcccgggacactcacccctccgtgtggcacccacagctcaacgcctcggtgagcgccttccagagacgctttgtggttgatgttcggcgctgtgaggagctggagaagaccttcagtgagttggtcccaggcctacattccaggcaggcttcctggaggaggcatgggccaagtttgatctgaaaggaagagtctgggtttgccaggtggaaggcagagaagggaggtatatgcagggccctgcagggccaagacagagcagctgggatctgtgaagtgtgcttgcgaaggtggctgccttgtgtgggctgagcagagggcctagggcagggctggctggggaggcctcgaatacagcataagagcccaggacttcgtcctgtgggcgccaggaagccacaggggtttctaagcagggaagaggcacagacagctttctcctctacagctgggctggggtgggtggggcccaggatctagggtagggtacccctaaggagcaggcaaaagggacccctgccctgggcaacccctctcaggaggagcctgtgggggcaccaaggcaggggcatggggcaggcagggttttgtgtttgctggtgcagtttacagcttttcaatgatcaggcagacacaggactcacgccagctccggtcccaagccctgcagcgcaagggccggcctgtggggagacctcaggccctcttctgagtggtggccaagggactggggagggagagtgagcccagacctgagctcagggaggggagcacagcttctggatgaaagtttggccgggattttctggccacctccacctggtgaatccagcagctggtggccgatggagtttggggcagcaggtggggccctcaactgttgagacaacctcaactgcaccccactcccgttcctctgcgcccagccttcctgcaggaggaggtgcggcgggctgggctggtcctgcccccgccaaaggggaggctgccggcacccccaccccgggacctgctgcgcatccaggaggagacggagcgcctggcccaggagctgcgggatgtgcggggcaaccagcaggccctgcgggcccagctgcaccagctgcagctccacgccgccgtgctacgccagggccatgaacctcaggtcagctcccacccaggcaggagactggggggctggggaggggctgtccagcctagggctcatggtgcttctgggttcctagctggcagccgcccacacagatggggcctcagagaggacgcccctgctccaggcccccggggggccgcaccaggacctgagggtcaagtgagtgagggatgacctcatgccctttctggccagcccagaacccctggccagtcgctgggctgggccaggctgagctccgactccttgtccagtgctctccccaggctggccccgcctcctccttcaggcccggaacttcccacagtcccaagccctagccctagggggttctcctcttctggtcctgcccgggaggcctcctgccttcccctgtgggcagggccagtgtgcccaattgcccgattgcccgtgctgggcagggtcctgcccggggggcctggtgggggaggcagggcaggaggttggagcagccctgcccagccccgtggccgccagctttgtggcaggtgccgtggagccccacaaggcccctgccctagagcgcctgctctggagggcctgccgcggcttcctcattgccagcttcagggagctggagcagccgctggagcaccccgtgacggtgagcagctggcgctgggctggggggtcctgggcagagcgggaccccagagtcagctgagcctgctctgcagggcgagccagccacgtggatgaccttcctcatctcctactggggtgagcagatcggacagaagatccgcaagatcacggactggtgagtcactgggaacacccgccccaccgccctgctccccaggcccctgctgtcacctcccagcccgccctatcgtgactcctccccatgagctcccttcagactcagagtctcgtagctgtgtccttctggcccctcacgcagcgcatcctccctccagcttccactgccacgtcttcccgtttctgcagcaggaggaggcccgcctcggggccctgcagcagctgcaacagcagagccaggagctgcaggaggtgggtgcccccggccttccggaggcgggtgtaggaggtgggtgcccccggcctcccggaggtgggtgcaggaggtgggtgccctggcctggcctccaggaggtgggtgcaggaggtgggtgccctggcctggcctccaggaggtgggtgcaggaggtgggtgcccccggcccagccaccccacctgcctgcccagcccccgctgactgcccactctggcgcaggtcctcggggagacagagcggttcctgagccaggtgctaggccgggtgctgcagctgctgccgccagggcaggtgcaggtccacaagatgaaggccgtgtacctggccctgaaccagtgcagcgtgagcaccacgcacaagtgcctcattgccgaggcctggtgctctgtgcgagacctgcccgccctgcaggaggccctgcgggacagctcggtgagcagcctgaggcctcgccccctctccgcccgcccctcctaccaggccggggcgtttctgcctcacttccagcctctggctccctgcacctgggctttgcctaggggctccttctcctcccagcctcctccatggcccaccgcttccagggagtctgccctgatggccctggcccagcaagccctaccctgactttcctaagtccctggaggctgcacaggatagttttaaagtcagaagcctcattccaatccaggcccccctgtgaccttaggcctgctcatggtctgtggaaccggtgtgatgcccctgcctccgggggtcacccgccgcgcacagcaggtgcttgcgggtgaggctgggctccttctcctgggccgtccctaggaggcagcatgcttgcctttcccaagcaattgccaatccatgtggtgtctttgggcccccaccagggcagagcagggctgatcatctcacgtcagagagaggggaaggggctgcccagtgagcccccacagggctctacatctccagctgggcctggctggagatcccagggtccctgaaggcccccgccaccgttctggtctgtctctgccctggcacccagatggaggagggagtgagtgccgtggctcaccgcatcccctgccgggacatgccccccacactcatccgcaccaaccgcttcacggccagcttccagggcatcgtggatgcctacggcgtgggccgctaccaggaggtcaaccccggtgagagccacggcatccttacccgtgtcctgggaggctcagctgccccactgggtgggtgtgagcctgagggggaggtatctccatcctgggcctggcctgccctcctgggatgaggggcacacatcccatcactctcaaggggctgttgggctctgcagccagtgtgaggctttatgtcggcccccagccaactcccccttgttgagtttacaagggagccggcacgggcttgtgcaaagaacagaggctgtgcggtgggcatggcccaggttggaagcccatctcgcctactttgagacatttcttagcttctctgagcctcagctgcctcacctgcaaaatggaaataatagcgcaaacctcagaggaatgttgggaagcttagtgactgttggagactgcaagctggagccaggggcagcctttggtgtggttgctttggttgcacagctttttttttttttttgagatagagtcttgctcagttgcccaggctggagtgcaatggcatgatctcggctcactgaaacctccgcctcccaggttcaagcgattctcctgcctcagcctcccaagtagctgggattacaggcacgcaccaccacgcctggctaatttcatatttttagtagagatggggtttcaccatgttggtcaggctggtcttgaacccccgacctcacgtgatccacccacacaggccgttgggggcccaagcaccctgactcttgcccactggatgaggcagggcccctccctgtcctgtgaccaagtcccctcccgacatgggctccaccacatcacacccatgctatgggccgggcccccactcagtgtcactgggggcactggggggtttgctgcttctgcagggccagtgtcctggggctggatctgggccccaacaggattcccctgcacgtgggcagaggctggtgcagctagagcatcacctggaggcccgtggcagatagaatgctgccagctcaaagcaccagccgtcggggcagcgtgtttgccagggaagctgtaacaaagtgccaccggctactggcttaaggggcagacacggtcccacagtcctggaggctggaagtccaagaccaaggtgtcagcaggggccgggggcactggctgatgcctgtgatctcagcactttgggaggctgtggtgggaggaggatctctggagtccaggagttcgagaccagcctgggcaacatagcaagcccttgtatcttaaaaaaataaaagatgatgaggtgttgtcagcaggagtggctccttctgaggctgtccaggaagatctgttcccggcctctctcctgggcttggagcggccgtcctcatcttcacacactgttctccttctatgtgggtccaaatgttccttttcataaggacatcgggcacactggattggggcccactgtaatggccttatcttaacccagtgacctctgtaaggaccctgtctccaaagaaggtcacatctggagttcctgggggttgcgactccagtgtatcttttttggggtcacaacacagcccctgacagtgtgtatgttggggtcctcctgcctcccatgaggacttgttcccattttactgatgggaagtcgagacttcagagctgaagtgaccagctcggcctcccggaacttgccatgtgccagctggggctgcctgtggctccctgtcctctctggcttctgtgtggagctctgggaacagcaacagctgaagctgctaacttcctgtggctccagcagctggcccgtgctgcccgtggagaacttatgaagtggtctggtgttacctgcattttacagatggggaaatggaggctcagagaggtgaagtggctgggccaaggtcacacagctcctaagtggtgggttctttttttttttttttttttcggagacagaatcttcgctctgtcgcgcaggctggagtgcagtggcgcgagctcggctcactgcaacctccgcctcccgggttcaaatgattctcctgcctcagcctcctgagtagctgggattacaggcacctgccaccatgcccagctaatttttctgtttttagtacaggcagggtttcaccgtgtgggccaggctggtctcgaactcctgacctcgggtgatgcccccccccccccccgtctcggcctcccagagtgctgggattacaggcatgagccactgtgcctggctgctaagtgatgggttcttgactgcaggccagcagggcctccgtggcgtcttgggccgggaggcagatgctggtgtgttcgggggttcccagctcacccacctctgcccacagctccctacaccatcatcaccttccccttcctgtttgctgtgatgttcggggatgtgggccacgggctgctcatgttcctgttcgccctggccatggtccttgcggagaaccgaccggctgtgaaggccgcgcagaacgaggtgaggggcggggctggggtcctgatgagggtagcagggccaggcagcccctcaccacaccactgcccccccagatctggcagactttcttcaggggccgctacctgctcctgcttatgggcctgttctccatctacaccggcttcatctacaacgagtgcttcagtcgcgccaccagcatcttcccctcgggctggagtgtggccgccatggccaaccagtctggctggaggtgaggcccgggccccagcccggctgggggccccgcagcacccgcagccctgaccgccctcccctgcgttgccgcagtgatgcattcctggcccagcacacgatgcttaccctggatcccaacgtcaccggtgtcttcctgggaccctacccctttggcatcgatcctgtgagtcctgggatggagtgtccgtgggtggtgaaggcagctgggagtgggggctggggctcccctcggttcagccgtcctgcagcgctgtcgctgagcactcctgtgtgccaggccctttcctcagcacaagaggcagacaagcctcctgccctgcggagcctgcatcacagtcccctgagtgtgcggaggcaaagcgagaccagccaggaaccagtctcctgagtgtgcagaggcaaagcgagactggacaggaaccagcctgcagcttgcactgtgccaagcactgttcccaaccctctgtggaagtgattttcttttttcttttttttatttttggatatagagtctcattctgttgcccaggctggagtgcagtggtgtgatcttggctcactgcaacctccatctcccgggttcaagcgattcccctgcttcagcctcctgagtagctgggattacaggcgcccgccaccatgcctggctaatttctgtatttttagtagagacagggtttcaccatgttggctaggctggtctcgaactcctgacctcatgtgatccacctgcttcagcctctcgaagtgctgggattacaggcgtgagtcaccgcgcccagcctgattttctatttgaacctcgtaacaaccccgtgggcctcacattagtagtgtcctcacctaaagaagagactgaggcacagaggtcatgcccaaggtcacccaggctggcaccgtggcagctggcccatctgcgctctgttgcccctcggtgggtgggtgatggatgaggctgcaggctccgagggggaaaacagggtggtgagagagtgactcgggccggggacttcctggcagtgatggcgagggagcccctgagtccagcccacccctgctgccaccctagatttggagcctggctgccaaccacttgagcttcctcaactccttcaagatgaagatgtccgtcatcctgggcgtcgtgcacatggcctttggggtggtcctcggagtcttcaaccacgtgtgagggccaaggctgcccgggggacgggaggctggcaggccagagtgggccccagtgagcacacctccctcttgcccgccaggcactttggccagaggcaccggctgctgctggagacgctgccggagctcaccttcctgctgggactcttcggttacctcgtgttcctagtcatctacaagtggctgtgtgtctgggctgccagggccgcctcggcccccagcatcctcatccacttcatcaacatgttcctcttctcccacagccccagcaacaggctgctctacccccggcaggtgggctgcggctggtgggggccgggctcacacggcctcatggggaccccgcggtcacagggccactgggagctgcaagatcctcgtccgagaaacggggatgcaggccccgggccgtgcagacagggccgtcagaggtgatggtgtgcatctttagcaggtggcacaactggcactgggaaccgggggtcccttccctcaggagtccttatggaggcagaccctcacccagtgagggcacggagcccccgggggccctggagggaggagcgaccgcaggctctctgggccccgtgactgctgtgactcaggttcctttgcaggtgtgcacagcagggacgccctgactctcgccctctccctggcaggaggtggtccaggccacgctggtggtcctggccttggccatggtgcccatcctgctgcttggcacacccctgcacctgctgcaccgccaccgccgccgcctgcggaggaggcccgctgaccgacaggtgggaccggggcctaaggtgtggggggctgcttgcggggagaggccactgtccggtgtgtccctgactcctcgcttcctgacagactcctgagtggccaggagcaggcctggcgggtggtgggggacctcctggggctggagtgctgccaacactgcctgctcatgccccaggaggaaaacaaggccgggttgctggacctgcctgacgcatctgtgaatggctggagctccgatgaggaaaaggcagggggcctggatgatgaagaggaggccgaggtgggtgcagtgccttcctgggggtgggacggctgaggccctgccggccctcactgcacccgccccgcagctcgtcccctccgaggtgctcatgcaccaggccatccacaccatcgagttctgcctgggctgcgtctccaacaccgcctcctacctgcgcctgtgggccctgagcctggcccacgcccgtgagtgacctggccaccgacggctggccccagctcctggcttctcacataccgctgctggctgggcgggttgcttctctctgggcctcagtttcccctctgtaaagtgggactgtccaaggaggtccctcgctggccccccgtgcagggagggcttcaggctgcggcaggtaggtagggggctggcaggcacccacttgccgttggcccccactgtctcctttgcttgcagagctgtccgaggttctgtgggccatggtgatgcgcataggcctgggcctgggccgggaggtgggcgtggcggctgtggtgctggtccccatctttgccgcctttgccgtgatgaccgtggctatcctgctggtgatggagggactctcagccttcctgcacgccctgcggctgcactggtgagcgaccacccactggcctgggctgctcaaggcgtgagttcccctcaccaacccctctgcttctcacccccagggtggaattccagaacaagttctactcaggcacgggctacaagctgagtcccttcaccttcgctgccacagatgactagggcccactgcaggtcctgccagacctccttcctgacctctgaggcaggagaggaataaagacggtccgccctggcagtgatgtctcgtctctcttccctcctttttagctgaggcaggtggcagggtagaaggcatggtgtaggatctgggacctcaaaagtcaaggcctggacctgagcagatctgcaataatgtcagactcttggggtgaaaaggggcagaaaagggccaaggagagatgtttccagcacattctaacttggagtgagcaaatgtcttcccaggccgggtcaggggagtgagctccccatccttggaggtgtgcacctggctgtgagcgggtgtctgggttactctctgttgggagtggtgccaatatccatgccctggtgccgggcctcaggggtctggaagtacagagcagtgtggggcacctgagccccggccagtgctccatgcagggccatggtgtcacacgcccaaggccacacacctgccaggaagggtagaggctgtccccagcagcagacattacccaggaccccggggttcagaacaggggctgagcctgactccaggcccagcctcccctcacctgagactacagtcttcctgatccctcccaggtggtccttcctgcgttgctggcagaatgggggtggctttctgcagttccctctggcctgggtcccacccccactgggaggcagaggaagtgcttcccagaagccaacaagctgcaaagtggttcttcccacagctgtggctgaggccagctgctgggaggagcctgtccattggctcctggactgctttgctcaggacctctggatgccaggggtcgtatcaggggctctaaggtaattccacatgcccagcagattcagcttagagaaacggtgctcacagtgctggggtaggagcagagaaggctaaatgaaggactccggagagctgcaggtggatctggaccaaatccagaacccaacgccttactccctcctggggagagagctgggcagagacttggggcgggcagtgaggtggggataggtgagcagcactcgtggtgagtggccccagtgtgatttaggaggggtgcagtgtgggatcccagggacatgaccagtcagccccgccctggctttgacatgggggtgcctggcagtggtggctagagaagtccagtttgccaagagaatggcacataaggcactggggtgggcacctctggggcatggacatagggagacatagggatggggtgggtcacctgcgtggaggactgggcactgaacagcacaggcccgagcccatccttgtccacgtgagcttatggcctgatgtagagaccaccaggggctccaggaaagttaagctgcatggagagaaacgatgggccagggccgggcccagggtggtttagggaatggcagtgtcctgggtagaataggaaggcctgagactgtgactgagctgacagtggggcaaagtgaaggagcccagtattggaagatcggctccacatgtatctctgcgaggagactgcaagcgagctcgtgtggaccaggcagaggcgagggctgagtgaggccagcagtggcctgggcacaggaagacggtgagtgagaagccactggagctcctgtgcaggagcgcaacacctttactgcttcattcagtttggcttcacctgcttaaaactgtaactctctagaaggctgaacagcaaaagcctccctcctgcccagccgctcagcatccccaggcaccagcactgctcccagtctccaacgtcctccagggctcttcgcttctgggctagaagcagggaaaccagagtgtgctggggaagaagaggaggaggtggaggagggctgatgatggggccacatgctgctgggatgccagctgagagcagcggagcactgctaagctaaggggctgagtgggtgcagatggagccctccgtgggctccttcaggtaccaggagccctgcctgagattcaggacacatccaagggtgacagcttgaggttgggtttttatttttttatttgtatagtacaatctctgtggtagcagaaatatatgcacaaaaaacaattcaaataagagttcagagtaaaaaaaagtcagctaagactgtatcccgcaggacatttcatatatatggatttcacagctacactcgatccacgccccacaccacatacaggctgctgtctcccacaagaatgatgatgtcaggggcatcaggaaaggtaagggccgggaaaccgggcccttggagaaccctgcccaggggaggcccagcctactcacaggatccgacactccaggcagagcagagggcaggagaggcccaaagagctaggtcaagcagctggctcccctgggaggggagccgggagacagggaggtcctcacactgcccccgtggccacgcatggctgtctgcacactccatcaggaggaagggcaggggagaagtcacatgcagtacagtgaaactcatcagtgtcacacacgcccagcaggaggggagagctctgctccacacgctggcggccttggctgctccagagcaatccgctgctccagcttcagccatgggaccaagagggtaaaggagcagcttctggaggccccaggcagaggccaccttgcagcagtgactggcgactttgcagtacatctctgctcacttgctgtcccttgggagtgagcaccgtctataacacatcgccatctacaaaagcctggtcacagtgttcaccagcacattcatgaaaatttaaatcaacattaaccaaagtacctgcaagtaacactgcttactcttgctgtttgcctcatctgactggaaaccttagcccccaaatatgaaatgccttctctagattaaaaggattcagagatgttgcactattgcactatatttctgcttcccgatctcgtttctgagtcctagtgaaatcgtaaacaagagatgaaataaacgtcgctccattttaataccgtctttagtatcatacacatgtgttcagtagtgagccacccaaagcctcctgccacaggagcagtagtcgaagcacagaggggaccccgctctgctgcctccccatgcagtccagtgatgaggtggatggagtcctccccacagtcacaccccaagcttcctcttctggtggaaataggcatcaaaccttgcttgggcgtagtcctaggagacagcaaagagaaggcctcagcaaggaatcctgctggcctgaaccctgcccatgtgtcccccaatccccaccccaggcaagagctgagggcacggacccatgagaccaaaagcacaggactggcctgtgcagcagggctgctcgggggcctcgctgctctacaggtgcaggctcctcaagctcccagcccaccccacacaccttcattctcaggaggcctggtttataggcatgggccagcccagccctgcctctcaggatgaacgtctcatccacatgcttagcactgctaccattcatcaccttgctaaccctgggtgctgtgggcactgactgaccgacataacacaccttttagagcaaaagacccctgggacacaggcgagtctagaacagaaggggagaagaggatgcccatcgcctatttcccgggatctcctgcagcatgacttttaagaaggacactgagaggcaagggagaaaacccggcttggtgttctgtttctgccactatttttctgggattgtgttgtgtgaggacaacacaatctcaaagacccactcctaatctaaaagtctgcaattctagaagccaggaagattacaattaacttttttgaaaaattaactgagctgtaatttctactctacaagcatgagcccattttaagtgtccagttgagggccttcacagatgcatccagccagttctccaccaccgcagtcaggagacctgtgtttccagcatccctacaagctcccatgggcctcttgcagttggccacaggcagccaccgactcaatatctgtcactatggactggacttttctttcctagagtagcacataaatgccactatacaatatgcagcctcgtgtctggcttctcactcagcgtgctgtctctgagtggcctgtgctgtcatgcactggtgccaccttccttttgcactgccgagtgttctcagtacacggatctggcactgtcgtatccacacacctgctgactggcatttaggctgcttccagtttgggacgattataaatgaaggtgcagaccgggcgaggtggctcacacctgtaatcccaacactttggaaggccaaggcagacggatcacttgaggtcaggagtttgagaccagactggtcaacacggcgaaaccccctctactaaaaataaaaaattagctgggtgcggtggcgggcgcctgtaatcccagctactcaagaggctgaggcaggagaattgcttgaacccgggaggcggaggttgcagtgagccaagatcgggccactgtactcctcctgcctgggcaacagagtgagactctgtctcaaaaacagacaaacaaatgaagctgctatgagtgtttgagtgcaagtcttggtgtggaatttgttttcatttgttctggaaaaattccccaggagggctgctgggtggtctaacccatcttcacactggctgtcgcgactgcattcccagcagcagcgcatgcgcattcccattgctccatgtgctcgccatttgggaccgtcagttctttcaagttttagccatcactgtgggtgtgtagggtatcgcaatgaggctttgattcacatttctttaatgactaattatacaaaacacatgaaaagattcttactggccatgtgtttctcttaagtgtccaaatcttccatccatttataaagcaggctgaggccgggcgcggtggctcatgcctgtaatcctagcactttgggaggccaaggcgggtggatcacctgaggtcaggagttcgagaccagcctgaccaacacaaagaaaccccgtctctacttaaaaaaaaaaaaaaattagccaggcatggtggtgggctcctgtaatcccagctacttgggaggctgaggcaggagagtcgtttgaacccagaaggcagaggttgtggtgagccgagatcgcaccattgaactccagcctgcgcaacaagagcgaaactccatctcaaaataataataatgaagcaggctgtttggtttctggctgagttatgagttctttatatatcctaaatatgagtcctttattaaatatacatttgtagtatttcctcccagtctgtggcttgccttttcattttctccatgatatcgttcagagttactcattttgataaagtccaactgtgatgacatatatgtgtgtttttgtccagggtccctggctcataactcccatagcccttactacagtaaacagaatctctctctctgaccttctgccgtcctttcacctgcccaaagctagactctaatctgactgtgggtcataagactcttattccagagggggtcctgcaccataccctgggataaggaatgctgtacagagaagcccgaagaacctggtcaggtcttgctaggtttagatcacaccttttttgtccaatcacatttcaacacggttgtccacatttcaatcatgcctatccaatgacatctccataaaatgcccaagaggacagggtttggggagtttctagagaactgaatgtggaggctgacaggaaggtgaacaagaatgagttccccaacccacccacagggacagaagctcctgtgctgggaatcctttcagacctcaccccacctatttatctcttcacccttaaaataccctttgttagctaggcatggtggcggaatgtctgtagtcccagctacttggaaggttgagacaagaggatcgcttgagcccagaagttggagaccagcctgggcaacacagtgagaccctgtcttaaaaaaaaaaaagtaatacactggtaaacttacgtgtttccctgagttctgtgagctgctctagcaaattaattgaacccgaggggaacgtgggaactccaatatatggctagttggtcagaaattccagaggcctggacttgcaactggtgttggaagtggggggcagtcttaaggtctcaaccctcaacctgtggggtctgactctgtccccacgtagacagtgtcgtaatggaattggagggcacccatctggtgtccactccagaactgattacttgtttgttggcggggagaaccacccctgacgtggtcactttagtcttctgtggtgatgattgttgctgatgaaaggaatgggaaaaagcactttggtttttatgtgtttcctgctcacagcaacttactctattttttcctcttttatggctagtgctttatgtaacccaagaaatctgtgcttaggtcagtaagcttttctttttttcttttttgagacggagtctcattctgtcgcccaggccagagtgcagtggcatgatctcggctcaatgcaagctccacctcccgagttcacaccattctcctgcctcagcctctccagtagctgggactacaggcacctgccaccaggcccggctaattttttgtatttttagtagagacaaggtttcaccgtgttagccaggatggtctcaatctcctgacctcgtgatccaccagcctcggcctcccaaagtgctgggattacaggcgtgagccaccgcgaccagtctaggtcactaagcttttctcttgtgttttctcatagaaacttaatagttttagccttcacatttaggtctattatctgtttcaagttgactgttgtttatggcacagaatcaggttcagttttttctccacatgactcttcaaatgttcttgcatcattttttgaaaatacaatcctttccctcttaaattaccttggcctttctgttgagtaccaggtgattatatacacatggatcaatttctggacactgtattctgttccatctgatttgttttttgttttgttttgtttttgagatggggtcttgctctgttgcccaggctggagtgcagtggtgtgatcacagctcccctgacttcccaggctaaagtgatcttcccagctcagcctcccgcgcagctgggactacaggcatgtgctacagacacccagctaattgtttcgtattttttgtagagatgagtcttgctatgctgcccaggctggtttccaactcctgggctctagcgattctcctgcctcagcctcccaaagtgctggatgactggcttgagccaccacacctggatgatttacattacttatgccaccaccacactgccttgacttctgtgcttcagagaagtcttataaccaggtagtagaagtcttctttgttcttttacaaaattattttggttattccagactctttgcattttcatataaatttcaggatcagcatgtcaatttctacacagaagcctgtgggggttttgattaggcctgtggggaatgtacaggtcagtgtggggagaatgagcatctttaccttaaggcttccatccatcaaggtggtatcttctccatttatttcacttctttattttttacactctttcatagtttccaatgtacatatcttacactattaaacatttttccatgtacagttgtttctaccatgtagaaatccaactgatttttgtatactgaccttgtatcttgtgactttgataaactcattcattaggttaagcaacttttctgttgattcctttattattttaaaagcacacaatcatgtcacctaaagaataaaggcagtgtttcttcttccttcccagtgcacctatatttcctttctttgtcttgcctcactgcaccagctaggagcttcagtacaacacagaagacatgcagtgagaacaggcgtccttgcatgttctgtacttggggtgggggtcaaaggggacattttccctgttaccactagtgataatgttggctgtgggttttcctttttttttattgagacagagttttgctcttgttgcccaggctggagtgcagtggcgtgatctcggctcactgcaacctccacctcctgggttcaagcgattctcctgcctcagtttcctgagtagctgggattacaggcatgtgccaccacccctggctaattctgtattttagtagagacggggtttctccgtgttagtcaggctggtctcgaactcccgacctcaggtgatccacctgccctggcctcccaaagtgttgggattacaggcatgagccaccgcgcctggctggctgagggtttttcatacatgcctttatctggctgaggaagatcccctctagtcctagtttgctgagatttttttttatcacattggatcttgtcaaatgctttttcctgtggtccctgagataatcatacggtttttcaccttcattctgttaatatgaagaattatatgaactgattttttcaaatataaaccagccttgcattccagggataaatgccacttgaccataatatattatccttttacatatgttagtggatttaatttttgccaatgttttgatagggattttgtgtaatgtttcttcttatggaatataaacatttaagctacaaagccgtaagtttctagatactgctttatgtatatcccacaaatactgacatgctatgttttcattataattcagtttaaaatattttctcattttctttttaatttctttgacccagggtttatttagaagtgtactgtttaatttccaaataattgagaattttctagctatcttttgttgttgatttccacttaaatttcactgagaacatatccagtattatttcaatccctttgaatttatcaagacctgtctgatgggccagcatatggtctatcttgaggaatattccatattcatttgaaaagaatgtgcaccctgcagttgctggggggtttaatgaacatgcatgaggccaggctggcagggagagttgtaaggccctatccctccttctgcgtgtgttcctcctttgttctaaccacagaagaggagtggtgagatctcccatgttttttgttttgttttgtttttgtttctgagatagagtttcactcttttttttttgagacccagagtctcgctctgtcgcccaggctggagtgcagtggcgtgatctcggctcactgcaagctccgcctcctgggttcatgccattctcctgcctcagcctcccgagttagctgggactacaggcacccaccaacaggcccagctaatttttttttttgtatttttagtagagacggggtttcaccgtgtttgccaggatggtctcgatctcctgacctcgtgatccgcccgcctcggcctcccaaagttctgggattacaggcatgggccaccgcacccggccagagtttcattcttattgtccaggctggagtgcaatggcgccatctcggctcactgcaaactctgcctcccaggttcaagcgattctcctgcctcagcctccctaagtacctgggattacaggcatgtgccaccatgcccagctaatttttgtatttttagtagagatagagtttcaccatattggttaggctggtctcaaactcctgacctcaagtgatccaaccacctcggcctcccaaagtgctgggattacaggcgtgagccactgcaaccggccgagatcaccaactttaatcgtgaatctgccattttcttctttcacttttgtcagttttaatatcatgtcttttgaagcaagacaagggtttttaatgtcctctggatgtactgatgcctttattatcacaaaatgcccttctttatctctagtaatattccttgttacgaagtgtgctttgtcgtacagtatcatttgaccatgactcaaatctgctttaaaaatccaatgtccccttcttttacctaatatcatccttgcattaccaaaccttctgcctagaagtagaaatcattgtagtataagactgaggaggtcaaaatgaactagtcccatccctgtcccaaaggaaggcagctcaccagactgtggacatttgtgttatcccccaccccaagacaactcaccaacattcattcactatggaacaacagaaaggtttgtctgaaggttaaaaatactttctatttctatgtcagtgacagtttttttttttttttttttttttttttttgagacagaatcttgttctgtcacccaggctggagtgcagtggcatgatttcagctcactgcaacctccacctcctgggttcaagcggttctcctgcctcagcctcttgagtagctgggattacaggcgcccgccaccatgcatgctaattttggtatttttagtagagatggggtttccccacgttggccaggatggtctcgaactcctgacctcaggtgatctgcccacctcagcctcccgaagtgctgggattacaggcgtgagccaccgtacccggctgacaattcttaaggttaaaattaaatgacagcctagcttggttacaaacatgcctatgaaaaacaggaggtctaattcaataattaccagcttccaacccaaagtcgggcactacaggctggagaatgaagtggtaaccgataaataaaaccttccacagcacaggcaggagccacccactcttcttcacttactgtcccgtgtcagaagggactgaggtcagagctggacttcgagggtgcagatgcctacattccccatcaggattgcaggcacttctctgaagcaggggaggcaaggtcagctggcctggaagtgagggcaacctccaaaggcaaccacagcatcagtgacagcggcttctcccccggcttcctgggctgagccacactgtcctgatgccaccaggtcaccacattcgggtacttggggagacagagaaccctctgtaaggaacagtcatttgctgccaacattcacaaatactatagcatttttacctgggagtaggaagaaaaaaaaaaacaaaaacgctgctaaaacataccatgtacccaaattcaatagatgaaatcttggcttgtacaatggaccacagtccccagaggaaatgagatgcaagggcaaacctggaatgataaaagcaagaaacatataagagacatacagtatcagttacaggactgatgaaatgatttcatgccagatggacattttaacttgtgtggatgcaaacctagttagtgttggcaaatcatgggtctatattccacgggactaactaagaacaatgggaataccactcccacacccttccctcatctgctagtgacaggtgcactggtgagtgtgaacacacacagctggcctggccatggcacacgtaaatgccacttggccataatatattcacaaggtgaatatattcacattcacagggtgcaggtgaaggcctgggtggccatgctggcagaaaagaaagcaagcttgctacaagggagggtgcacaccatagcaaccaagaggcagccctttgctggaggcgggatgaagctctcactccttgagcaagagaattctcaaatcccatccttgtcccatcccctcctgtcacacagaagtgaaaagagcagatcagagagcgtgagccacgtcaccatctctaagctgtaccaagcccccaagtcactgtgaatccaagttcctcctcaaacaataccctgagggctcatccacatgaagataaagctcaaatttaggagtgcctgctctagtatcctccaaccctactctctgttcatcctgtggtccccggcccacaagagtcccgtgtgctaccctttctgtctgggttctcctccatctgtttttttctatttccaccagttcaagaaacagaaagagatgatgtatgctgcggtgaagcccagcaggtaggcaggtgtgacatcacacttagtgttgggggtgagcactctggaggccacgaggagatgactgtgctaagtgcgtggaaagatgaggggccacagtgacttaaacagccattctaccaaaaaatgtcacaggagaccccaaataataggaacaacccacaggcctcttgactaaagagatggacaaatagtggtctagacctttgcacaatctggaagtttcagggccctgctttgaaaactgttgagaaaacagttaaaagcaagacttaaaaccgataaacataagtttaatcattttctaggagaaacttaagagttaaaacacagcatatggtggccgccactccagaagcatcagtgacaagtttgcagggacagatgcagtagcccacatctgtaatcctagcactttggggggccaaggcaggagaaccacttgagcccaggagttcatgaccagcctgggcaacagagcaagacctcgtgtctacaaaaaaatacaaaaattagccaggcatggtggtacgtgcctgtagtcccagttacttgggaggctgaggcaagaggcttgctaagagttagaggctgcagtgagccatgatcgcatagctgcactccagcttgggtgacagatcaagactccatctcaaaaaaaaaaaaaattctataggctctgggtggcagcagccctgtatggctgggttgttgtgtctggatgacagttcagaatgccacaaagtgtcctgacccttcttggacatgggaactcttcttgtgatatggtttggctctgtctccccacccaaatctcatctttaattgtaatccccatgtgtggagggagggacctggcaggaggtgattagatcatgggggtagtttcccccatgctgtcctcacaatagtgagggagttctcacaagatctgatggttttacaagtatttggtagtcctaccttcttctctatctctctgcccctctctctcctggcgccatgtaagatgtgccttgcttcccctttgccttctgctatgattgttaagtttcctgaggcctccctggccatgcagaactgtgagtcaattaaaactcctttctttataaattacccagtctcaggtaatatctttgtagccatgtgagaacagactaatatactttgcctgctgtatgctcagatctgaaagctctgcatagtctcggccacaatggagaagtagcagattctatttttgacaaagtgcaagtcctaaagatgtacgattaaaaagaagctcctaggccaggcgcagtggctcacatctgtaatcccagcatgggaaggccgagctgggtggatcactggaggtcaggagttcaagactagcctggccaacatggcaaaaacccatctctactaaaaaatacaaaaattagctggacatggtggcaggcacctgtaatcccagctacttgggaagctgagacaggagaattgcttgaacccgggaggcggaggttgcagtgagccgagattgcgccactgcactccagcctgggtgacagagcaagactctgtctcaaaaaaaaaaaaagaagaagaagctctaaaatactcctaattgcaagtcagcatctcccaaatatagtctataaagaggaaagctatctttacaaatcaaaaaaggaaaaatgttacctattaacttcaagcaacatttcttcttttataatggatttttcttcagtactgaggttttcaaagtcattttggaatgcaggcaagtaactggaaataaaatggagcttaaaaaaaagtaattgtgttaggatcaatgatggttaaaatagacaatgtcaatagctgtcactaagcatatgcatctactgtgacacactgggagacacacactcaacatgatgttcagcatctccgacatcctggggctggcaccagtgagccaacctttgctaggttttcagccgctctctctccccaggatttctagtggagatacagtgtctaggctcttcagcatactttttccatttagagtagcacttaaaacataaactggagaccactattttggaggcaggcttggtgcaccctcccaatcctactcagcttcagcaccgctaccaaggtttcagtgctgggctgaggaatgggagagaaagatctcaggaggaaattcccatgagaactgattctccacacaatcaccagcctcctcccatcattcaggacaggaaagggaactgttaacaccaaagatatttcctcccactactaaaccctggtgcccgaaagattacttctctctccatagtgtgaaatgaatagaaaaaggtcagtgatcaccaaaaagatggccagaaagcagaatcaaggctgggcttttcaaaaaaatactacaaggaactacaaaggatgacaaagctcttctctgaatacaagtatctctggcacagagatttttaataagctggactaaaaggtcaagtttgtgtctacatttaacaggaacaaaataacattttttaacataaaccaaattttaaaaggttatctttaaaaatgaagatgtaggccaggcatggtggctcacaactgtaatcccagcagtttgggaggctgaggcaggaggatcacttgagcccaggagtttgagaccagcctgggcaacttggtgaaatcccatctctacaaaaaatacaaacaattagctgggcgtggtggcatgcgtctgtggtcccagctacttggggggctgaggcgagaggatcacctgagcacagaaggtcaagggtacagtgagccatgatcgcactactgcactccagcctgggaaacagagtgagaccctgcctcaaaaaataaaaaagaagatgtaattctaactgcatgaaattgacatgtaattttcctatcaagtatacaaaaactcatctcctacctgttgtttcttggtgggatacttccggatgtttgctctgaaaaaagggtatttttcatagctataatcatacatccactcacagaagtgatttccaatgtcgaatcccctgaaataagacataagacagtgcacacaatgaggcaaaccgtatgcctggaggctccctgactgcagaagaaagaaaggctgagttccgagcacgccactcctgttgccatctggacttgctgagggagcaggactgtagctgctttaatgacagagagagacaacaggtggttgatcagcatcacagctgactaaagctatacaggtgcacctgaaccactactccagaacattgtgtctcctagaccaggatttatgagaagaaaatgacctctgaagccaaaagaaaatgccaaagtctggactgaatggcatggctgtccccaactagcgctgtctgctaggaacaaagaaggctgtgctgcttcaccacaaccatcaccggccactggacgagaagccactgattccaggtgaagcagcttgcaactcagagcggcattttgacttattttctctaataactgttaattaagcatatcgtaatgataaatcaatattgagatggaaacactggactgtaacacagtacctgtaattgtaactgctgtattcgaaatcaatgagcatcagtttctgtttttcagaattctctcggccttccagcaacaagatattacctgcaaaaggtttggataacatggtttatgttttacaatagaaggctcaagtccttgaacagcagagccgagagaatggatttgatcccttagggaatcctaactgaatgtggcttttggtctgtggacatcaccagggcctagacagagcgtagaagtgctcacgggaggcataaccctatgcagggtggctcctgacccacctggccatgagaacccctgctcacagccctagtcctcgccagacccccaggatcactgtggaacaaagcctggcctcttgctctgctgtcaggacagtacttcccaaatgttctgcatggtggcatgcaggagctcgtgctagccaaacaccaccctcagcagccctgggacttggtttgctgtctgcaggccagctggctgcagcactccagctgggaagctgtgggagtgccctcctggtaagaaaggcaagggagagctcagctgccacaggggatcccctgctttgttcttgcctgcttttccttcccaaggagaccacaggcagcattcctacaagactatttgctttagtattggattctgggtcaggagttggtcagccatcagcctggctctgcaggcctgcgttcctgagatccccacactcgacatgatgttcagcatctccgacatcctgctgctggcaccagtgagccaaccttcgctaggttttcagcagctctctctccttaggatttctagtggaggtatagtgtctaggctcttcagcatactttttccatttagagtagcaattacaatgtaaactggagaccagaaaacgtgtattggctcacacttgtaatcacagcactttgggaggtggaggtgggaggatcacttaagtccaggagtttaagaccagcctgggcaacacagagaaactccatctccacaaataattagccaggtgtagtggtgtgcgcctgtgatcccaactactcaggaggctaaggcaggaggatcacttaagcccaacaggctaaggttacgtggagcctagactgcactactgcacaccagcctgggtgacacagtaacagtctcaaaaaaaaggcaaattggaggcagacgcccaaagtagcacaacaaaattaatgtacaactgttacctcttcgatccttcctacactttgccatcatcaacacagccgatctcctccagtcccctctctctagtgatgtctgtgccatttatcaccccctcaccaccagaagggcaagggtaatacacaaagctgtagctgtaatgtctacaccctccttgagttagccagcgatgagcagctaattagtaaaaggtaatttggctcaaatgaatggcttatggatgacgagtcttcatgagaaactgttctcaggattaaaagcaaactgctgagcctggcaaacaagggctcaaggtgggacctgaactactgtgactaggggaggcaaggtcaaggcagagagaggccatgtcagcagcaccagtgggagctgcatagtggggggcctctgatgagactgttcaatgtgcaattgcatgggatgaagttttgttacagtaaggaacatatcactgtcatgttttcaaagcagagaagcccgaaataattaatagcacagtgcactgatactaggagaggaggtgttaggattacacgtgttgcgataagcaacactacgctgtgtggtgcagaagggggaagggcccgggactcaatggggtaggcagtggatcttgttcttttattgctttttcaggttaaaaaaaaatcatacatgtttactgtaaggagttaaacactgaaaaagtaatatgtgacttagaaagtttaagttcttcatcccagttcccaagtttagtgaatattctttcggatttcttccatgtaattttttttttttttttaacaggatcttgctctgtcatccaggctacagtacagtggtgcgatcacagcatactatagccttgaactcctaggctcaagccatcctcctgcctcagcttaccaagtagctgggactacaggtgcacactactatacctggctaatgtttttattttttgtagagatggggtcttgctatgttgcccaggctggtctagaactcctgggctcaagcaatcctcccaccttggcctcccaaagtgctgggattacagacatgagacattgtgactggcctcatactctataaaaataatacaaaacctcattgtctggttgtatcatactttaatgtacctaatactcttgatgctaccttacatttttcagacacactgccagtaattttctaagtatgcacacaaacctcatctgtaacagaacatagcaattcttaccttcttgacagtcattatgacaaaatacaactggagatggagtagattcaagcaatgatctgaaaagaaaggtttcactgttacccatcacgcttctcagtcagctgcacacagtcttgctttctccacatggccagcaccaaattcgtgctccaaagcaacacacagtttcagagtagtatctgtgatgtgaattctgacaactgcgtcattacgtggcaacaactccacaggccctctgcactcagctcttcccccggaggacctctgcatgtgccgctccctcctggagcccctttctctgctggtctcggcttgtatagcacccccttagacagcccttctcttaccagtgacccaagcaggtcctcctatgcagactaagggcctactttgatctgtttctgtcacagcacttatcacaatttgacattattttatttgtttacttgttttccctcagcagcgatcatcaagcctagcagaggaggcacaaacctgagtaattaaaggtgtaaatacttgtggctgggtgtggtggctcgcgcctgtaatcctagcactttgggaggccgaggtgggccgatcacgaggtcaagagatcaagaccactctggccaacatggtgtaaccccatctccacaaaaatacaaaaattagctgggtgtgggggcgcatgcctgtagttccagctactcgggaggctgaggcaggagaatcacttgaacccaggagggtgaagctgcagtgagtcaagatcgcgccactgcactccagcctggcaacaaagcgagactccgtcttataaaaaaaaaaaaaaaaggtgtaaatacttgttagtgtacagatgtgagtggcctgcgccaagcatcactctgaggacaatgacggccttgcttcagagatcagtatgaagactctgtttctcgcaaaagccaaggttgaactgtaaggaagaaggatcttcctcacactccccagcctgcccttactcccttctccccaccagagaaaatccaccccaccagacactctactgccctggccaccaagccactcctttgacattttccttctcaatggaaccttcacaaactgaccagaggccacgtgtgggcttctagtccatagagtccataatctctagtcctctagagaaccataattccagatgacaaaacttatggtttaaattcatcctgtaaaaccaatgtaaaatgccagacataaggcaagctcaatcaatgtttactgacaacagttttagtgactaagaatatttaaagtcaggaaatagaaggaaaactcacctcaggttttccagttccaagggcagattgtaactgagcaatttgtggagctttttaattctggattcctcagtaaatttaattctcagcacttcctttagatacctattaaaaaattttcaaaaaagaacagaacaaagaatcaccgatcaattcaccaaggcttgctgttcttggggctttggttaaacattcaatcccagcgcagtcacaatgccagtgggacccctctgactgccatgactgaggggaagaggagtggccttgggggttcgtggcattctaggaaggtgactttcttctgtcccttcacccgttcaatagcatttttgcataagccttctttcctggtttaggaattgacttttacacacaagaaagacttacttatgagacaagtatcaccagctgacaccctgcacttcagtgaactaggaagacctctgactactgtggcaaacaaatgctcacttatggtacttctgggagccaccactgtaaaactatgttaggaccaagtgatttgaccacttacttttccattgtgccaaaaagccattttggttccttattgaatggcattttcataccatgaaatgtagccattttctcggcgatttctgcagaaatatctggcaaacttaattcttcagtatctaatcgccggctctgaaaaagaaaagggagttaaaaactgacatttaccaagtaaactaaaaagagtgagatcacacagtcttaggaacgagaagtgtttttgtagtgcatttaagtctcacccaatgccccaaattcccttaagaatggacactgtgtccctacagacagtgacccagcaattgctatggcatttctacagtgaggagccggccacctccaaagatctatttcattttgaaccctttttaactatgagaactccttccttaaattttattgaactactacactatcatctattattctggcctctaaaaccacactgaatgtctattcactacccaatgctgaagtccatgtcttcagcagtttatcacatggccccacttccagctcctccatcagctgggacattctactctgatgtgttgcaggtgagatgtggggtccagaataggtcctaaccaggagatgcgtcacagagacaggggggccgtctccagctgctcccagtggtggtgtcagcacctggcctggcacagagcaggtgtccagggcaaagttgggcaaagaaacagtgtctagaggacttcctcctggcctctgcatcctgcacttcccctaaatcagcccgaggccatgcttgtttggctgcccttttacaggaggcccatgggagctcacaatcaactgagacctccagagcttcctcatgcaacctgccaccctgcagaaatctaaagagaggtttctgtgaaaatgcaaagaagtacagcacaggggtaagagtgaatgctcccaactcagggaaacctcagttgaaattgtggctttaattctcatttcaaagctacatggccatccaagttacctcatacatctgtgtgttcccatttctatcaaatgggaatcaggacatgaattctctcacagagttgccaggagagctggaggagagaatgcagatgaggtctctgggacagcacctagcccagggtgcagctcagcaagtggcagatgtctgctactgagagctaagagctcactgtaagcattggactcaaccttctattcaactccctccagaaagcactgtcaccacagcactgtcaacaaattaccatgctgcaataagaacagggcctccacttccagcagcaggacacacaggacttattaaggtagctcactcagctttcaaaactgccattaatttggcaacaaggaaaatctgaagctaacatgctcagatatgaacaaatctcagtattccaaattccttccccagtagagaaagagaaacagactacctactatccctagtggcccggctattctcacatgccctttgaaagatggctacaggaatcatgaaactaaatcacctgatcccaagcagtgaagagtaaacctaagccaggcgtggtggctcatgcctgtaatcccagcactttgggaggccaaggcgggaggactgcttgagcccaggagtttgagaccagcctgggcaacacagggagaccccgtctctacaaaaaaataaacaaaattagtcaaacatggtggcacgtgcctgtagtcccagctactcgggaggctgaggtgagaggatcacttgagcctgggaggttgaagctgcagtgagctgagatcaggccacttatacttcactatactgggcaatagagtgagaccctatcttaaaaaaaaaaaaaaaaaaaagcaaatctagaaataacatacggtattaggttgaatcaaatgaaactgccattcttgttggtcaaaaacagtcaaacaccggcggcgtcatatggttcaaacctagtatataacagaattttaaaaaaatcttcactatggctgggtgcagtggttcacacctgtaatcctggtgacttaggaggctgagacaggagaagagcttgaagccaggagagttcaagaccagccagggtaacacagcaagacccatctctacaaaaaaaaatttttaataagctgggtgtgctggtgtgcacctgtactcccagctacctgaaaggctaaggcagaaagatcacttgagtccaggagttcgaggctgcagtgagctatgatcatgctattgcactccagcctgggcaagagagtgagactcccatctcaaaaaatttaatatataataaacaatacatacaagagcatagatagaacttaagaactagaacaaaatcagttccacagatactataatctatgtgtcctgatgcctgccctttttgtccccaagatatttttattattctgaattgtgttaacacaattcccttaccttttccaaaaagagaacttttactacatgtgcacatattcttaaacaatttttaaaatttatcaggctttatagaatggtatgatactacttacagtctcctgcagtttgatcattcaacattatgtttgtaagattcacctatattgccacttataaccatatgaggttctattatttacaaaattctttcaaaaacttatcatctcggccgggcgcggtggttcacacctgtaatcccagcactttgggaggccaaggcgggtggatcacctgaggtcgggagttcgagaccagcctagccaacatggagaaaccctgtctctactaaaacatagccaggtgccagggagcaaactaaaggaaaaagccagcgcagtgaaggcaccatccactcatctaaacacatcctcagcactggcagctagcacaacactagcacagacggacagtgccactgtcaactagaagaggatacctcttctggggagacagagcacaactagcctctctgtttctgggctgtgggattagacaaagaaacccctgcccctggtccccagccagacgcagcagagcacccctctgccaggcatcctagtgctgggctccatctgcacagatgtacagggcagccctggacatgcccaggcctctcatggataagatatctcatgcagcagggcaggaaaagctagcagcttatgattctagtcctcaaggaacttacgctcaatgaaaatggggaatatctgatctatctaggaagagagtgcaggctgacaaagacgagcattgccaatcaaagaagtattgccagggctcagagccacacttcaacacttagggttcatgagaacctctgggcatgaagcattgtgcagggcatggagtcaggggtgggtgggtagaggaacaggacctatgctttagatatgtacatgtaactctaagacatggtatactggtaaatgttacagcaacattaaaactgccttgggacaataagaaagggaaaataatcctgactgcttagaaataagactgcaaggtcttggagcaaggccttgaaatctaagaatttgaccagcatatggggacaggaagatgggaggtagggagactcagtaggaatgcacaaaacaaaccaaggaagggtgatgggaaagaacaggcatggcccccacagggctacagtcagagactgagcagggccaaggtgttctagcagcaagttctataaagcagggccctagaagttgagaggaacacggtgaaaagggcaaagtctcagggtacacagcctcaggggacaataaaatggtaagtttcatatatatttcaaatttggatgaatacacctttacagaaaagaaagaggttcggatgtaagtacaaaataaatgttgcttttcatgatttctgatacagtttaatgacataggtgaggttaacagtgaaaacacagcattgcaggttcttgcagcaatgagacaaagaagccatcttctgtctgtggcatatgtcaactaagcgtttatgaacaaatcttaccgggatgaactgctccagtcggccttggggaaagatgccatagagttttggcccaagtgacctctctgcgagaatggcaaacataacgctctccagaaccatggcctcagccccctaaaacagatggcaacaaatcaggtgtttactgagtgtttgctaagcgccaggcatcagaagcactctcacaggagtgtttcatctgatcctcatgagtattctttcacgtgggcactactgttatcatcatccccattttaaatatgaagaaacagaggttccaaagtcacacatcgtgtcatttgcaggattcatgcttgcaagcactatgctatattgataagatttaaaatatgagtttaatttaggtcactagatccaaaaatagaaaaatatccatcagtgcttttattgcttctatttatttcgcaacctatataggagtctcacccttggtatctcaccaaaggccacaacaccatccattctggtaagggttgatttgcttttggttgagtgtgtctagttaaagcaaaggatccaaaggaccttctgcctactaaattgggctcatgggtccaacaagcttgaaaattactgatttaggtccagggtctacggctttctagtccaaagagcaccctagcatggagcatcctagattgctattttcagttggcacacccgaccttttcctgttattgaatgtttgttgtcttgctgaaatctctatgatgctgtctgttctatcttcgtcctaataattaacgtgggatctatcatcattttgccttcaaaatccatgctttgatctcaaagcaaattcagtccttggtctttcccccttaaacagcacattacagcataatggtttccatctgttggagtgaaggagtcacgcttacccagaggtccacctgaatctcttaaagagcttttacaggccaggcggtggctcatgcctgtaatcccaacactttgggaggctgaggtgggaggatcacttgaggccaggagttagagaccagcctgggcaacatagtgagatgccccaccaccaccgaagtctctttttaaaaaaaagagcttttgcaaagagattcctaggtcttactccaagtattaaaagagaggcaccagcagggctgttttgaaaaagctttcagatgattctaattcaccccctgtgaagcaatgtgctgtggaggaacatgatcccagagaaacctctaaaacacattcacgttaccaaaaactgagaaaccaagaggacaaacttattaggaaatgatacagtactatagtaagaagaaaacaaaaaagaaaagctacttccaaaggatatcagaccacattaaagcaaaaagtattttggtcacttttacattttgtgggggtaaatggatttgccggtaatccccccacaattatcgtctacaaccatcattcgtataatcctcacaattatggcctgtgatcttgtgaggctcaatctttcctaatttgtggttttgtgtatatgacaataaactgataacatctatctatcaagctaatgaattttagggtgggatttgatatcagacaggttttatttcttaaaaccttagagaatgaaaacaaagatctagtatctctatttagttgtcaaaaggtttccaagaactttttagtcctatggtagtgttgtccagagatgcagtccccatcttactccaagcccaacatcacagaaagtatccggggcatttaagcaagggtctgcaaagcctcctccaagtctctgcttagacattatgctcccctgctccccagggggcagcacggtcctggtgctctgaagactgtggtccccaccaccaccctcatgctgtgtaaaacacaaaagtaaacaggggctgggcatggcaggacaagggggtgctggactcggaagttcagcattttgcacatcatgtccactgggaaggattctcggaggtgactttatttacgtgtggcatcgtcaacacatgtcaccagcactagccagaatcctctccagagctgagtcaacccagaaaggacatagagaagagggaaagagatgtaagaactttccaattctctttagcactgccctaaacattgtaaacaaaaacacacttattcttacgtaatactgtagttcaatatttattcacagtaggaagaaagggggagatggtgtatggagagaaggatttggagaggaagaaaatgaggccgggtgcggtggctcacgcctgtaatcccagcatttcgggaggctgaggagggcagatcacctgaggtcaggagtttgagaccagcgtggccaacagggtgaaaccctgtctctaccaaaaaagtataaaaactatctgggcatggtggcgggcacctgtaatcccagctactcaggaggctgaggcaggagaatcgcctgaacatgggaggcagaggttgcagtgagccgagatcacaccactgcactccagcctgggtgacagagcaagactctgtctcaaaagaaaagaaaatgaaagagaacacccaggcacaagcaagaaaaatgacaggttaaggacagcagagaatcctagaataagtgtaccaactactggtggtcttcttgtcatcactatgtctccaggcaccttcctgattgctcctgaaagtgagcatggtaaaaagggggctggacagacatggctgggttctctcctgtaccacgcactggtttagccacagctggtgacagtggagggaaaattggtcctactttttcagatatctcaacttggaacaatttacttgggcttcagaaataaagactcattaatacatttgcctaaaacacacttactcaatgtctactatgtcctggcactgtgctaagcgccagggaaccaacaaagaacaagatacataaggcccctgcccacaacggggcttacatgacagagaaggagggatggggagagagagagaaatggacagtaagcaagtacacgcagctatggactgggctcactgccatgagggaaacaagggtgactggtgtggtggtgtgggtatttctaaggaggccacactgaactgacctgagatctgaggtgtgaaaagccacagcagccccatgggagcacagggccatgaggaaggaacaagtgtgacgccttcaaggaactgagaggcctgtctcactggaacaggacaatcaaggaaaaggaagagcagagcatgagattgccgggtggactggggcttacagataccaattcacaagtcctcaacatgttgttgatgtttacagctcacaaactgggttcgatcccctggggacagaagaggaggaaccagcacaggccttaaaatgccctttcttatgtgactgtcaccacagtaagaaagctttctacagggcaccctcgcatacacccccaaaacaaacactatccccacagcaatactcactctcacaactgggcaacacttattaatattttctactctatttcattttaaaaagcaatcaacatgctaacatttcatgccccactagaggttcacaagccacaacttgaaaaactggtttaagttcaggcagcaaaaagaggggccagggcagaaggcaaggtgaggcaggcgccactgccaggaaggagagtggtattccctaatggtgctgctaagtggccattagatttggcaatatggaacctgttggtgacaaaaaaaagaacagcttcagagtgatgggtggacagatgtcagattggagcatgtgaagagtgaacagaaacgggagagagaagtggttgagaatggaacaaggggtttaaactgacttttcactttatctatgaagtttcatttatttaaaacccaggaagaagagtattgatgttatgaacttcttgagaagacataacagcatttctgtggtatttcagccaaaaatgcataacctcaattgtgagaaaacactagacaagctgaaattgaggagacatttccaaaataacggatcagtactcttcacaagtataaagattacaaataacaaaagaattgttacaggctgaaaaagactaaagagaaatagccaatgcaatcttgagatctagctaaatctcgagacagaacaaaagaaaatatgcataggaaaacttctgaaattcaattcaggtcatagttcagttattattttttttttggagatattattattattattttttttttggagatggatagcccaggctggagtgcagtggcaagatctcggctcactgaagcctccgcctcctgggttcatgcgattctcctgcctcagcctcccgagtagctaggactataggcattcactaccaagcccagcttatttttgtatttttagtaaaaacagggtttcaccctgttggccaagctggtctcaaacttgtgaccccaagtgatcagctcacctcagcctcccaaagtgctgggattacagacgtttagttatcactattgcatcaacgttaatgtcctggttttgaccattgcactgtggttatgtgagatgttcgcattagggaagctgggtgaggggtgcatgggaaatctctgtactattttttttttcttttgagtcggagtttcgcactgtcgcccaggctggagtgcactggcacgatctcggctcactgcaagctctgcctcctaggttcacgccattctcctgcctcagcctcccaagtagctaggactacaggcgcccgccaccacgcctggctaattttttttgtatttttagtagagacggggtttcaccatgttagccaggatggtctcgatctcctgacctcgtgatccacccaccttggcctcccaaagtgctaggattacggcgtgagccaccatgcccggcctctctgtactattcttgaaattttttctgtaagtctaaaattggtatgaaataaaaggttaaaaataaattcatataaaattcacataaaaaagactgaaatcggccgggcgatttcatggcgagtttgaggggcatgtgagacatccgaggagagactgctagccaatggcattagttccaagtcgaggtcagggctggaggaagaatgtagcggccctttggcctatagatcaggtgaccgagggagacaggacaacatgagaagagggcctatggtcaaatcatggggcgccctagcatgtagacagccagatctgtactttgtgtctctgtgtcatggctgccctcaggagaggaaacatttcaaaagggtgggggtcatgtcaaatgctactgagaagtcaaaataaaatgagaactgaaaagtactttggatttagcatcacgcaggtcctggtgatccaccattttcagctaacaggatgtccaaaggcctctgcacaaagggcttggaatggttcacaacagattgtcaatcacttcccacccaaggacttcccagtcactgtcactccagagagcacaagttctagatcctctagcagggcacccagagcaagacacatgtaaaacaagccgctgaaaagtgtggaaaaaatatcatcactttcattccttttttatctcaaccgttttaatgtctatttcttgatttttttcttttttttttgcatttggtggggacgactcctgtcgcccaggctggagtgcagtggcacaatctcggtctactgcaacctccgcctcccaggttcaagtaattctcctgcctcagcctcccaagtagctggaattacaggtgcccaccactatgcctggctaatttttctattttcagtagagacggggtttcaccttgttggccaggctggtctcaaactcctgacctcatgatccacctgcctcagcctcccaaaatgctgggattacaggtgtgagccaccgcattcagcctatttcttgaccattttaataatcaatatacaattggtaaaagtgatgtggcgatgtgtgtatctacatcttagacccacgtatgttgggcatgtgtgcacatgcacccttctctgtgagcctgcacataatggcagagatgctcaaaaggtgcttacgctggggcatgcagaccaacaccccagacccctgcctctgaggctccatcggtcagtgctcttggcctcaagccatctgcacatgtgtgtttcagagagtggggtcacattctctaagtctaggaagaagcttttccaacttgggtatcatccataggaaaaaacattgctgttagcccatggaaaatgggtggccaccaaaaccactgggcagtgacccgcttcctgatgggaagtgtgggaacgaccagaaagggggtgagagaggcatcacagcagcggcagccagggcctcctcatcaggtaccacacacgaatgctcccctggctgccatctgccaacatccgaatgctgtttcgattgccataaagacaccaaacttccacagtctacactctcaggaggaatgaggaatacccaccgctcactcagtctccgtaaggtggcttctgatagatataccaagagcccctcctcgtagaaagatagatcaggattttccaagggtagataagaggcactgccaagccctggagtagcgaagggtggctaacactagttcacatctcacacagatgcagaaagactgaattacttacttgaaattcattttctttctgagcttgttcggatccctctttattacaggacctctatgaatgagaaaaaggaaacacttctggtgagatggggaacactaaacagacactaactttgcaaccaccagaacagtcagggtttacaaaacatcacaggtctttaaggaaggtttctcagcccaccgatgtgacgggcagcatctaatgcaccagcagcctccagcactagtaccaacaccttagaaagtgcttcattgctttacgagaaaagggatgtgccggtgagacccgatagctgcacgtctcacagccgccccatgtacctttcacaatttcattgttagaggaaagtcaatagagtgcactcttccaatcaggccttctaaagacaagcggtcaggctgagtctctcaccaatttagctacgtggttctctcaagtcaacctgcaagaacagggagtgtaaacatgcctgtggacagctgtggtcagcacagaacttggacagagaagaaagcgctgtgcaggcaggaaacctggcacaaaatctgtgcagacatgccctgccgactcgccactttcccagagtaacccctctagttcagccggtcaccagctcaagctgaactgttcctctaccataaagaggactgtgtgtatttaataaagtctctaaaattatttcatatattaatatattaagaaatacttatatcactttcctcaatgaaattgcaaatttatgataaccaggattctagcaataacaacacactagatcattaactaccataaacaacccttgggctacattctttctcatggtacagatcatatattttaagagcaaccccccaccccaaatgctttaaaatccttcgtactatctttaataagggaatggggaaaagtaaagtcagaaacttgtgtcacgtcaaacttttatactcaaatactgcctctaaaaatgttacttgttaaattaaactaagtctgcttaagccagacacaaaaggaatcccagaaaggaaacctctttaaaaaaatttaaggtaacagattcttgaacaccccatgaaaaacatacctttccattccacagctttatcaaaaatacctgtaccaagggtggaaagtgtggacaggaaaaaaaatgccacgttaagcaacaccagctactctagcaccaatcaaaaacctagtgatttaaagcaaccactcatccatcacacactgaaataacattacagacgttttaatgcatgttttgtataaacagtacatgtaatataaaagtaaacaaaataagtatccatgttcataaatctatttgcaaaaggctcttaacgtttgcactgatacatattcaatactatatttagcatacagttaagtacatttggtacaaagtacagaaagtacaaatggggatttatgatattttcatttgtgtaatctgcagttctctgatgaaaagatgttacaggttaaatcccgttacaatgaaagctataaaaatcaaaatactacaaaaatgctttcagatctttgcagatggtttgatgtgcgatgtggtaggcgctggaaagcttcccttcaccctaattccaaacactctcgtggccgcatcgttccttagactctgctttgcgggtcgcctcttccaagcagtctgtaaattcctaatgaatagggactgcgtcttttattgatgttagtcttctcccagagcaccaagcaaatctcgatgcccactacactttttaggctgcatgaataaatgaacactccggagtggtatagcacgaggcaagtgagcccaacgagctgcctggtgccacgcagccaaccagtgatagcaaattcccatccagggtcttggtaacaaggaagctggctgtggggttaattagaaatgccccttcaaaagtccttgtgtttttttctccaaagaaacttaagaacaaaaaagttctataatctgatatattacatattaatactttgcagtataagctttaagacaaataagttagatactcttctgaaattgttgtaacgggatttgacctgtacacaattctaaatgactatggttattcctatgctgttgttactctaactgtatcttcttagggagatacagttaatgggttatttagccttcagaagtccctttcccttatctaatggcgctcgcaaaagcaagttacttcatccaaagttaaaaattggctgaggccccaaagtctttcctttttttaaacatattggcactataagtggtagtaaatccatgataatctcccctgcccactccctcactccacccccagatgaattcatcacttataccataagagcaccattatgaaggcaagatggacttctgcaatatccagccctctgttctgtttcctcagtacagaatgttcaggctccctaagtcctgtaaataagaagtgtaagacgaggaaatctcaaaccaagtgtatattcatggaaaggtaagagaataactttttcgtccaggaagacaggaagttaaatatattttggggccggcgggggtggcccatgcctgtaatcccagcactttgggaggctgaggcaggtggatcatctcaggtcaggagcttgagatcagcctggccaacatggtgaaactccaactctactaaaaatacaaaaaaattagccgggcatagtggcgcatgcctgtaatcccagctactcaggaggctgaggcaggagaatcgcttgaatccgggaagaagaggttgtagtgagccaagatcacgccactgcactccagcctgggtgacaagagcaaaactctgactcaaaaaaaaaaaaaaatacatatatacgtatatatacacatatatatacgtatatgtgtatatacatgtgtatatatatacacatatacgtatatatatgtgtatatatatatacacatatatacgtatatgtgtatatatatacacacatatacgtatatatgtgtatatatatatacacatatatatacgtatatatatgtgtgtatatatatataggaatccgtgggattttacttcagtgacataaattcatttgaagtagatattaaaatacattgtataaatatttagtatgacatccaacttttctctaacaagttaataaaaattatcctctataagttataaaacaaaactaagctttttacatttattagaaatttgaacactggttatttaatattaagtaattattaaatttttttaatgtgaacattactgtggtcatttttaaaaaatcatcttatatagatacagactgaaatatttacagaataatataacatctggaatttgcttcaaaataaccctggtggagtaaatgagggaaaagatggaagaagactggctgtgaggggaagatgaggaatggacactggggttcattatactcttctactttagggtatatctgaaattccccataataaaaacttttaaaaaataaacattgaaatttcaagacctaagaaatcagaatgtctcaattatgcctaagacacccaactccataaatacactgaaaaccactgaattctacacttaaaaggcacacaataatgaaaaatatattgccactggcttcctcccaccttctttctttccttcctattttgggcttagttttcaagagaatcttaagttagagtcatatattcattagcctgtgatgtaggaaacaaatgaggctacagtgacagcattaataaaggaggcatacttactattttaaagttagcttttaagaggtgaaactttaaaaaaaaaatttggagactgggtctcgctctgtctctcaggttggagtgcagtggcaggaatagggctcactgcagcctcaacctccccaggtcgagcaatcctcctgtattagcctcccaagtagcaggaccacaggcatgtgccaccatacctagcctttttttttttcttgtagagacaagatctcactatgttacccaggctgctcttgaattcctgagctcaagtgatcctcctgccacagtctcccaaagggctgagattacaggcatgagccaccatgaccagcctgaaaaagattttttgattggccaagaacttttaaatttaaaaactaaattcctgaaagtctgaattatattagctatggagtaaaatgagaaaatagaggactttcatttttactttatttctatactttaaaaagtgcttaaaagcgtgtattatttttataataaatacatttgatacaaggtttcaaatgttacttttctaacaaaattgcaatttaaggctttggggtttttttgtttgttttgttttttgtttttgagacagcgtctcactctgtcacccaggctagagtgcagtggtgcaatctcagctcactgcaacctccacctcctgggttcaagcgattctcccacctcagcctccggaatagttgggattacaggtgtgtgccaccacgcccggctatttaggctttgtattttaaatgagactatgaaaagcagtaaatattcatattacagagcacaggttttcaaaatgttctacttcatgctttaaaaataaaatgggccaggcacggtggctcacgcctgtaatcccaacactttgggaggccgaggcaggcggatcacgaggtcaagagatcgacaccatccttgccaacatggtgaaaccccttctctactaaaaatacaaaaattagctgggtgtggtgatgtgcgcctgtaagtctcagctactcgggaagctgaggcaggagaatcacttgaacccaggaggccgaggttgcagtgagccaagatcgcgccactgcaccccagcctggcgacagcgagactctgtctcataaaataaaaatacaataaaaaaaatcaataagtggtaagacaactccaggaccaaggaggaagagatgtccctttattgtattttgtgttatatgattttaggattcaaaaacctactttaagttacctaatgttccacaatatagcaggtatatttcttttaacctatttaagccatcagacagaataaacttatttggccagtacttaatgaaagacttctctaatactgagggaagtaggtttatgactaaatgaataaagccccatttgggagatgaaaacaaagcagcacctcagttttccctagagtctgtgtatagtaagaatgggtgaaagcggcataaagaaagtgtcattaagtcacatatagttatcatttaaatgtcatttggctgggcgtggtggctcacgcctgtaatcccaacactttgggaggccaagatgggcggatcacgaggtcaggggattgagaccatcctggctgacacagtgaaacaccgtctctactaaaaatacaaaaaattgcctggcgcggtggcgggcgcctgttgtcccagctactcgggaggctgaggcaggagaatggcgtgaacccgggaggcggagcttgcagtgagcagagatcgtgccacttcactccagcctgggcgacagagcgagactccgtctcaaaaaaaaaaaatgtcatttaaaacatctttaacacccaaaacatttatcttcaaagtatctttaaacgtccaatactacatgagctgctgtgagacagattttaaaaagtgatgaatcagctacaaagaatagcatgtcatcaatagcaaaataaattggaaatgctatttaagaaacgaaatcattatcaattatggataatataatatgagccaggcatggtggctcacattggtaaccttagcactttgggaggttgaggggggcggatcatttgaggtcaggagttcaaaaccatcctggccaacatggtgaaacccaatctctactaaaaatacaaaaaaattagccgggtctggtggcaagtgcctgtaatctcagctacttggaaggctgaggcgggagaatcgcttgaacctgggaggcagagattgtagtgagccaagatcacaccactgcactccagcctgggcaatagagtgagacttcatctcacacacacacacaaaaaaatcataatatagaatagaaataggtactatgttaaatataatggtggctgctgaactaaaatgatatataaataagagtacaggttttttatagaaaaaaaattgtgccatccattttttaatagaaaaaaagaaaaatacacacaaaaaaagaaaattaagaaacatggatgacattctcttcttcctaccaccccttcctcaccaaaaaataactaaatggatcattcagcttactgtctcttttaaaggctttacataaaacggtagattgattgtgaccttttaaaaatgctttgagacctataaataaataagtaagaataatcctgtctgggtgcagtggctcacgcctgtaatcccagcacgttgggaggccgaggtgggtggatcacctgaggttgggaatttgagaccagcctgaccaacatggtgaaaccctgtctctacttaaaatacaaaaattagtcaggtatagtggcacatgcctgtaatcccagctactcaggggactgaggcataagaatcgcttgaacctgagaggcagaggttgccgcgagctaagatcacgccattgcactctagcttgggcgacagtgggaggctgtctcaaaaaaaaaaaaaaaaaaaaaaaaaaaattcctactgttagctagactcagtttcctcagtttctaggatatgtaaattttggtctcggaaaataatccatctttctactaatctggtattatcttcctgagctgagtactgaaacaactcccaggtcatcgtattcaccctgagaataggaggatatggtgcatcattcggattcaattcagtagctgtgatgcccatttggtcttggagtggcatgaacttctttactgtgtagcctgtggcttcggagacccttaatacccaccctggttatctcaccacactcaaccctctaggagagaaataatttttaatacaggggtggcatctgttataatccctggcctgccaagtccctgttgatgatgaagctatgttccatctcaggagaggtggggcaggaaaaagcatgagaaccatgactctatagaatgtgttcaattctatagaattgaaagagttatgtgactctttcaattaacattttgcagtatattttcttggcaatatgttttcttctcagagttatcatggaccctaaccttacttcttcctgatttctatgaaaaaaaatgaaatcatcccgtatttcttgcttttatggtttcttacagcattctttctcgaactcctgacctcagtgatccaactcgcctcagcctcccaaagtgctgggattacaggtgtgagccactatgcccggccacttttagcactttctgaaaacattttacagaacacattaaaatgtgagatctcaatgcaatgatttaaagtatagcttatgtgattatttaataagcacatatgaattacaagaatttaaacagataagtgatttctaacattttatggtagtctctagagtgtcttcaattatcccaaggaccagcctaaaacaccttgatctttttggacattaataatttcaaaattggatgacttgatgaatatccgtaggaaactagaacttctaaaacactttaggcaacacaagccagcagaaagacaggtgagtggaagcccaggttttaaaaaggcctatttcaggaccttctcaaaatctatgtctgatctagggcaacctgctgacccaacactcctcagacttccaagactaaataaaataccctccctctaagtatcccaaaggttgacttgcaagcaacacttttacgggaagtgtgccttcactacatcaagtcagcactgcagagctccctaaggtctcaggtacccagctaagacatatgaaagtatactgactggtaaggacaaagaagaaggtttgtttctaattctgaccaaaatatcaaaatatatatggtgtctccttaatgctggaagtgatatgaaggaagaacttgattacttcaattaagttatcaagttgaggcccataaatttctaaaattcctaaatgtttgtcattttctactgaggaaacagaagaaaggaatctgatttgctttggacaaaaaaaataagtgatatatttattacacaacattctgaaatcttaatcactgtacctctttaagcacagcacaaactgtagctggtgctacttaacaagcattacaactttcttttttaaaagcaattcttgaatccaagaactaaaagaaagaaattaaagctgtagagaatgctccaacttcagaggtctcatactataccgtgaatcgtgtctgtcacctggaaaccagagtgctccaggcacgatcgcatggacaagcctgcagcagagaacacatgcacatacagctaaagtggtacattacccccaacgcccttcactccacccaacataaagacattccttcccaaagaggggtgggctgcggtcaaaccatcgttccatggaccagaaatccgcattggcttcatgctataaatcccaaacatttaataccagcaagacaaagacactctgaatatgtaaaaattagacatagtagtctgtggtttatttggttatcaaaagaaggcaccaaagcaggtatggaaggactattggtagtaatttggcaactatcttgggagagtatcagctaaagaaatattaggttagaccaaatgggaacgcacaacactagaaaaatgttttacttctgagaaggaagttttgactgccttaggaacacagaattaaaccatactcaaaagtataagggaatttttttaaagcagagtgaacagaacaacttaaattcctaatgatcctaacacaatgaggaaaacagtggcaattcatagaattcagttaccagggacatgactccttcaaggagtaccagcaatgctggtctttgcatggtgtgaccttagtaacataaagaaataggttttagcagctgatttctcagtagctggtagtttaatattaactatttatgagttattccatattttattgtggcttaatttttaattaaactggggctaagagaaaatagggaggaagacatttgttttctagatttaaaaaggacagtgtctcaaatttgactcttttaagttgctaatacatatctgcgttgtgccttgatgcctttattatggttagtactcaaacaagcactaatattagccttctattactcaaaaaacaaacaaaaacaattttccagacaacattcaagagagatctttgatgtgtattataaacgttcatgcctgtgagaccgctcataacggtgaggccaaatctctccactcatgcacagaaggaagtggcttaacacagagtcactgttctgacagaggaagggacaaagcaatcctctgagacttccgccaactggcacaggttacattgaatgaacaatacgtactgacatttgtgtcttccacaattcatgataaataagcaaactggttatttgtaatcagccaaacttgcttctctgaaaaggctgctactggacgttgcagagctcatgttccttcccagtatcagaaaggaaaaaaatcaagttacatttatagctaattttatacatttacgctctcttctagcaattctatctctttccacaatgcaaaggctgaactattacttctcaaaacttctattaaattatcctcctttagttcagggtagttttacagttgagtttggttttcataatctatgtagctaatgaaaataatctcatttccattaaaattaaagacagtctatgtaaaacagacgctaaattatactcacatgcattaagatcagaccaatatttttatgtttaataatttcctacaaataatattgtatagttgtgtgtgtcttatcttgttcatattttcaaaaggacccattcttgaccttgccaaacacaggaattttcataagcaccctaaaactaacacaaatactaaacaaaaactccaggatacagtcaggaagtttgtttccgtctcatcttagatagaaataggggctagaagagacagatgtttgtgggacagaagctgtggagctgaacccaatcagaaagttttaccttggctttctggcacttaacccttagagaactgtaccaaagagcagtcatttcagtgtcactatggaaataaaggaaatcagacatcttataatgccaagatgaagaaaaatgagaaagttgagaatcatctagttattttaaaccaagtcacctgtaaatcatttgctgatcaaagaacgtgtaaaatgttaccacctctgattctcacagaggtaaaatgttcaaaagctaaaaacaaggaagagaaatggaaagaagggacatactaaactaaatctgtcatataattaaggaaaaatgcaaaatactctgaaaaaatacatagacctattatttgtgcagtagacttcaattaacatttttcaaagaaggagtgaattctaacccatcttaaaggacattatagctgcatttataaagttggcttgggagataccagttatattgtataagtacacatacatgtataggatatgtgtatgctttcccataaggtagagcaaaaagaaggaaagcagaagacttgagtcatactatatttaattctctctttaaccatgatgtgatttattattgggggctctgtatttgctcagccacatctctcaattaatgcaaatcttgacaattttttatcaatcctgacaatttatcataaattctggctttttttgttgtgataggaacaaaaccctcattgtagaccataaatatctccttccattataggccagattcattctaaagagctggctatacattagcaatttcatcacagctagatcacagcaaaaataaataatagaaactttaaagctgatttgaaaatatttggaaaggaatttaaaatcctcggcacagtgtgtggcagctcagcttctaaagcacacagcagctgttgcctggctcgcatcttagaagcttctaagcctgttctctactttgcttcttttgtaccatagccatcttttggagttcttgattttggttcccctcctcatgttgtcacagtactcccaatgaccaacagtctccaatggccattaatatctgaaactcttaactggcaacaagtatgactgctaaactctgcagagctaggaaaccaaatatacttaactctgagactctaggcttcatggtttcctaagtttaaactacaaccaaaaaagtgtgtttgaactaaggactcgaccaactgaataattatattgaaaatatagattcccacctaagaagcaaagaaatagtttttttctaacaaaaatcagtttgttgtctatgtcaactgtcagattgttagaggtatgcttattatccgtatagaaaactactaatttcccatccagttttttttgggttttttttttttttttttgagacggggtctctctctgtcccccaggctgcagtgcagtggcatgatcttggctcactgcaatctccacctcctgggcttaagagatcttctcacctcagcctccaaagttgctgggaccacaggcacatgccaccacgcccagctatttttttatagagatagggtttggccatgttgcccaggctggtttcaaactcctggactcaagcaatccacctgccttggcctcccaaagtgttggaattacaggagtgagccaccatgaccagccctaatttccctttctatccaaggtgctttcaagtatggtttctaccttacatcagtagatatagcttcaggaatggaaactcatttaacatttgcctaataaaaatataactgagaagctaaatgtagggtacctcctccccccaaattggaattatatgtaaaacatactccattctattagtttggtaagagctaattacattttaagtggcttaaattattctttttatttttcttagttacttaatagtcttttttcttagaaataaatcgggacatagaattctgttcaaacaaattttatttccagacatttctactgtatttaactactgtcaggtactacttccagactgctaaaatttcaaaatggaagaaagactaacaattgacaatgaatctttattagaggaaggctaattgccaagtagtaggctatgctgcagctggcttttactaagtgactcatataataaaccagaacattctagagttgggctgtccaatacagtggccacgagctacatgtgactattttaatttaaattaattaaaattaaaaacaatttaaaactcagttcaacagccacacttgccacattccacatattcgttagtgacatgtggctgatgacgagtgtatcagacagcacagatgcagaaccctccattactcccatcactatagcactgttctagagcacaggattaaactcccaggttagtctagcccacagaggagcaccttgtaacacatttaaaatgcttcttaagttagaaatgaaagcctcataaatcagatttaaacaatagttttaaatcacatgtaatttcagcatctacttattattgtaaaagtgttgtataaatgcaaaacacaaaaaacagcagaaatgggacttaatcgttgcagaacgtaaacagtcctcaaagaaaaaatgactatcaagacatagcaggccaagtgcagtggttcatgcctgtaatcctagcattttgagaggactagacgggtgcatcacttaaggccaggagtttgagaccatcctgggaaacatggtgaaaccctgcctctacaaaaaatacaaaattagctgggcgtggtggctcactcctgtagtcccagctactcaggaggctgaggtgggaggatcacctgagcccaggaggtcgaggctgcagtgagccatggttgtgccactacactacagcctgggtggcaaagtgagatcctgtctcaaaaaataaaggcacaccagtaaaagtgccaaaataatgatgaaagatttcaaaaactatactttgaaactgcaacctgattaaatttaaaacccaagctgcatggtgaacacaagaatcttttctgcttgtgtattaacagcaaggggtctgtgttttcagctggcatcaactgttgtcctagctggatgccagctatctgcacctaatgacaaagtgacctcagatatcctcagcaagtgcacacgtgtgtggaatagctacgtaccttcaaacatactaacttgttcccagcatttttagatcttaaccatttccacagcttgacagagtcaaggaaaagctatccaattaaagggtttcttcacattatgacaatttttttaatgaattaacatctagactgccaatttgaactttaatatttctaaacatataatcaaatatcatatggatatgatctactttttagattgagctgaaataggccggtcttttaaaaaatttagtttgaaaactactctgctctatttcattaagataaaaatgggcccttccaaagaagattaaaatggatatcagggccaggcgcggtggctcatgcctgtaatcccagtactttgtgaggccaaggcgggcaggtcacaaggtcaggagatcgaaaccatcctggctaacatggtgaaacctcatctctactaaaaatacaaaaattagccaggcgtggtggcggacacctgtagtcccagctacttgaaaggctgaggcaggagaatggcgtgaacccaggaggcgcagcttgcagtgagctgagattgcaccactgcactccagcctgggcaacagagcaagactccatctcaaaaaaaaaaaaaaaaaaaaaaaaaaagccaggcacggtggctcacacctataatcccagcactttggaggccaaggtggacggatcacgaggtcaggagatcgagaccatcctggctaacacggtgaaaccccgtctctactaaaaatacaaaaagtgagccaggcgtggtggcaggcacctgtagtcccagctactcaggaggctgaggcaggagaatggcgtgaacccgggaggcagagtttgcagtaagccgagattgcaccactgcacaccagcctgggtgacagagcaagactccgtcgcaaaaaaaaaaaaaaaaaaaaaaaaaacaacaggtatcaaaatcctaccacaggccaggcgtggtggctcacacctgtaatcccagcaccgcgagagggtgaggcgggcagatcacctgaggtcacaagtttgagaccagcctggccaacatggtgaaaccctgtctctactaaaaatacaaaaattaggcgggtgtagtggcacacccataatcccagctactcggaaagctgaggcaggagaatggcttgaacccgggaggcagaggctgcagtgagccgagatcgtgccactgcattccagcctgagctacacagccagactccatctcaggaaaaaaaaaaaaaattctaccacagaaatacctcaacctggccgggtgcggtggctcatgcctgtaatcccagcactttgggggaccacggcgggtggatcacttgaggtcaggagtttgagaccagcctgaccaacatggtgaaaccccgtctctactaaaaaagtacaaaattagccaggcgtggtggcatgcataacgtcagctacttgggaggcttaggcaggagaatcacttgaacccgggaggcagaggttgcagtgagctgagatcacgccattgcactccagcctgggcaacaagagtgaaactccatctcaaaaatatatatatcaacctaatatttctaccgtgctcaatgaaatagtaaattcatgacattaataataataataataaacccagacaagttgggatatcctataactggataattcaataggtactttaagaattagattatctaatataaaactttagaaagattatgactgtaacaaacaactcaaagttttaaagaaatctcagagaaacagttattaaattcagcttcgttgagatcatactttgttaactgggactatcctctaaaatcttttggataatgttataaaaacaataccttctccacattagaactttataatctaaatctgagctgaaaattttaatcaatatgtagaaccaagaatcatcaagcactattgaagatttaaccaacattgtaccttctctggatgtaaaactgggaatacttgcactagtttactaataaataataactaaaaaaaacacgaattaacttagaatgcaaaccaagctgtgcagcccaattaaagtaaaagtaaaagcaatatactcaaatatctttagtaacaccattaaagtatttaaaatctctttccaaggtatctcagcaaagaggatttaaaatgttaacaggatccccccctcccaaagtagcctaccaactcaccatctgcaaaatcgctccatacagccgcaggagcactttccgaggctcatcaccaagggtggctgtggtgtcaggtagggagcactggaacagcatgttgctaaggccgcctctgtcagaaataagaggacagtaagtatctttattgcaggtgagctaaatcactcttcttggataaatatggatgaaaagtcagggttacacaagaactgttctcatcttatctcgatttattctctcaatttaactccatgagtcacattaaaaacagacaaattccctttctgtttttctgcagtagaggtggggaagcgtttttgaaattgcccgtgtgggccgggcacggtggctcacgcctgtaatcccagcactttgggaggccgaggcgggtggatcacaaggtcaaggaatctagaccatcctggctaacacggtgaaaccccgtctctactaaaaaaatacaaaaaattagccaggcgtggtggcaggtgcctgtagtcccagcaactcaggaggctgaggcaggagaatggcatgaacccgggaggcgaagcttgcagtgagccgagatggcaccactgcactccagcctgggcgacagagcaagactccgtctcaaaaaaaaaaaaaaaaaaatcttgaggcaatatttaaaccttcttctctagggctttccatttgatatgtattaatagttccaagatcttctacgctagtgttactaaaaatctgtcaactgattttgactaggagcttgttcaaaaaactcccaacattaactggttaccacggccttcagatgaaacaggagacctcaatactctaatcacacaccaagtaagtagctaagcaaggaatcaaacccaggcatatggctcgagtccctgcttgtaactaaccatgaagagttgtcaaagagataggaggcaaagctggagagcaccatgtgccacattaaagacattacaggaggtcgggcgcagtggctcatgcctgtaatcccagcactttgggaggccaaggcaggtggatcacctgaggtcaagagtttgacaccagcctggccaacatggtgaaagcctgtctctactaaaaatataaattagccgggtgtggtggcacacaccttgtaataccagctacttgagaggctgaggcagaagaatcgcttgaacccaggaggcagaggttgcagtgagccgttatcgcgccactgtactccagcctgggcgacagagtgagactcctatctcaaaaaaaaaaaaaaaaaaaaagaaaaagaaaagataaaagaaaaatgtcataggagctgcgtgagctgcaaaatcaccttccatcaggactactctctataaacctctatgacacaaacatctccatgtcctattactgctataacaaattactacaaatttagtggcttaaaactgaaaacagattctgatcgagctcattaatttttaaaaataagggtaactaggtggaaatggggagttggtttaagtttaatgggtacagagtttcagtttgggaagacgacaacattctggagacggatggtggtgatggcagcacaacaatgaatgtacttaatgccactaaactatatatttttaaattgttaaaattgtatttttaatgctgcttattttaccacaattttacttgattttatttatttatttatttttttcagagagggttttgctctgtcatccaggctagagtacagtggcacaatctcggctcactgcaacctccaccacccaggttcaagcgattctcctgcctcagccccccaagtagctgggattacaggtgtatgccagcatgcttagctaatttttgtatttttggtagaaacggagttttgccaggctgctctggaactcctgacctcaggtgatccacccatctcggcctcccaaagtgctagaattacaggcacaccatgcctgaccttattttaccacagttttaataaaaaagtatgaagtactgatatatactacaacatgaaacttaaaaacattatgctaagtgaaagaagacagtcacaaaagaccacatgttatatgattccattcatatgaactgtccagaacaaggaaatctataaagtccattagtggttgccaggagctggggtgggaaggggtacttaggggtaggggatgatagctaaaagtttctttttgaaagatgaaaatgttctaaaactgactgtggtaacagctgcaagtatctgtgattacactaaaagccactggactgtacaatttaaatgggtgaattgtatggtttgtgaactatatctcattttcttaccaaataaaaaatttgaatgtgcttctagcacaaacaattttttcccagatttaagtaagacatatttaagaggttttttcaaaggttacttaaaatgaaaaaccatcatgagtctctaggaacaagacagcaagagtcaggatctattttcccagaaggttgtctaccttagttaaaaagaacaaaaataaaagggaacccaaagttcttgttttcccaaagcaagctgtgaagcaggccgacagcgtgtagatcaaaggaaccaaaagcagccttaacctttctgttaaacttggcgtggcgcctcaactgtgtggcttatcagaatccccctgccgcgtctggtcacagccaacatgggtttctggctaccaagcaacagaacgggcattaaaacagagttaaaagccctagtttttcttccggtcacatactctggaaatctcagtcaaatgcaaaggcaaacagatgaagtactgttctaaattgtgtaacctgattcaaagtttacccccgtactgctaaagaaggaaggcagactagcttggccagaaacaagctcacaacctggaaacccttcaactgctttttattacctgtagcctctattgttcaataggttttagtgaataaattgtcaattattttttagtgacagtcaaaataaatgaagcaaggtgactggcaccaataacccaaactgtgagaaatttacctagaaaaaaagccaactaccaatgagtcaaataataatatgaccaggaacaataaaatgtggtaggaagaaatgccagaaatggtagcaaaaatgtaacagttcaatttatcatataatttgtcaaaaatatcctcccaagtaaaaccccaggagctctcaaggatttgcaagaagttttgaaaccacaaactttatcacctggcataatagctttataagtcataattagatatgagaggcatgggctggatgtggcggctcacgcctgtaatcctagcactttgggaggctgaggcgggcagatcacttgaggtcaggagttcaagaccagcctggccaacatggtgaaaccctgtctctactaaaaatacaaaaattagccgggcatggtggcacgtgcctgtaatcccagctactcaggaggctgaggcaggagaactacttgaacccgagaggcagagattgcagtgagccgagattgtgccattgcactccagcctgggggacaagaacgaaacatcatctccaataaataaatacataaataaataaataaataaataaataaatacaagagcgaaacatcatctccaataaataaataaataaatttaaatatatatatgcacacacacacacatatatatgagaggcacaagatactcaagcaaaatctcaaatacagtgacaataacacacttattccacactcaacacaatgacaggaaggaaacagaaaaaagcaggaagtacctgctggcaggaattctcacccctgccctccagacccagtggtgcacgcatcactaactgtcaacccatgattccttaaaacagaatactaagggaataacaagcagtataaagaggttcttttttttttttttttttttttttttttgagacggagtctcactctgtcacccaggctggagtgcaacagcgcgatctcggctcactgcaagctccacctcccaggttcacaccattctcctgcctcagcctcccaagtagctgggactacaggcgcccaccaccacaccgggctaatttttttgtatttttagtagagacggggtttcaccgtgttagccaggatggtctcgatctcctgacctcatgatctacctgtctcagccccccaaagtgctgggattacaggcgtgagccaccacgctggtccaaagaggttattttacataaattgttgagcaaaaatgaaatgaatcatttcagcttctcttgatagccagaaaaacaaggcaagagaaagaaataaaaggcatccaaattggaaatgaagttaaattatccctgtttgcagacaacatgatcttacatatagaaaaccctaaagaccccaccaaaaaactatgagaactaataagttcagtaagattgcaggatacaaaatcaacatacaaaaatcagtagcagtattatttctaaacgggaggctcaggtgggaagatcacttgagcccaggaggtcaaggctggagtgagctgtgatcacgccactgcatgccagctaatagcaaattatctggaatggaaatcaagaaaacaatcctgtttacaatagctaacaaaaaaaaaaagaaaagaaaaagaaagaaatttaaccaaggaggtgaaagagctctgcaatgaaaactttaaaatattgatcagagaaactgaagacacaaataaatggaacaatatcccatgttcatgtattagaagaattaatattgttaaaatgtccatactggccaagcgcgtggctgacgcctgtaatcccaacactttgggaggctgaggtgggctgatcacctgaggccaggagttcaagaccagcctcgccaacatgataaaatcctgcctctactaaaaatacaaaaattagctgggcatggtggtgggcgcctgtaatcccagctactcgggaggctgaggcaggagaatctcttgaactcaggaggcggaggtggcagtgagccaagatcacgccactgcactccagcctgggtgacagagcaagactctgtctcaaaaaaaaaaaaagaaaaaaaaaagtccatactacccaaagcaatctatacattcaatgcaatccctatcaaaataccaatgacattcttcatagaaataggaaaaccaatcctaaaatttatatgaaatcacaaaagaccccagtagccaaagcaatctggagcaaaaagaacaaagctagaggaatcacactacctaacttcaacatatactacaaagtcatagtaaccaaaacagcatggtgttggcataaaaacagacagagaccaatataacagaataaaagcccacaaattaatccacacttacagctacctgattttcaacaagtgtcaagaacacaatagggaaaaagacagtctcttcaataaacagtgttgggaaaactggatatcgcacgcacaagaatgaaattagatccttatctcacaccatatacaaaaataaactccaaaatggatcgaaaacttaaagtaagacctgaaactatgaaactgccataagaaaacatagggaaaaagcttcatgaccttggtctgagccaggaattttttttaaaagacctcaaaagcacaggcaacacaaacaaaaataaacaaataggattatagcagactaaaaagcttctgcacagcaaaggaaacaagagtgaagaaacaacctacagaatggaagaatctatttgcaaactatacatcagttaaggggataatatagaaaatatacaaggaactcacagcaaagaaaggaaaggaaaccaattaaaaaatggacaccagctactcaagaggctgaggcaagaggatcactagagcccaggaagtcaaggctgcactgtactttagcctgggtgacagagcaagaccctgtttaaaaaaaaaaaaatatatttgccctaaatggtggcgtgtgcctatattcccagcttgggaggctgacataggaggattgtttgagcctaagagtttgaggctgaagtaagctatgaatgcaccactgtactccagcctggatgacagagcaagattccatccctcaataacaaaaacaaggcaaaagacccaacagacatttatcaaaagatgacaaataaatggccagaaagccacatgtggtaggtagcacgtgcctgcagtcccaactactcgggaggttgagatgggaggatcacttgagcctgggaggttgaggctgcaaatgagctgtgattgtgctactgcactccagcctgggtgacggagcaagaccctgtctcagtaaatttaaaaaaaataaaataaatggccaacaggtatatgaaaaaatgctgaccaccactagtcattattagactgtctattttcaatgataaaagataacaaacgttgacaaggatgtggagaaaagggaacccttacacactgttgatggcaatgtaagttagtacagatatgaaaaacagtatgcagggtcctcagaaaattaaaaatagaattaccattaagatccagctcctgctcatcaaagcaagtttaaaaaaaaaaaatccaggcttggtgcagtggctcatgcgtgtaatccccgcactttggaaggctgaggcgggcagatcacctgaggtcgggaattcgagatcagcctggccaacatggtgaaactctgtctctattaaaaaaacaaaaaaattagccacgcatggtggtgtacatctgtaatcccagctatttgtgaggaggaagcacgagaatcacttgaacccgggaggcagtgttgcagtgagccgagatcacaccactgcactccagcctgggagacagagcaaggctcagtctcaaaaaaataaaaaataaataaattaattaaataaaataaaaaattaaaaatccagcaatcccattactggtaatacatccagaggaaatgaaatcagtacatcagacatctacactctcatgtatattgcagcactagtcacaaaagccatcaattgattatagaataaatgtaagtgtccatcaacagatgaataaagaaaatgtggtatatatacacagtagaatcctattaagccttataaaagcaggaaattctgtcatttgtgacaatatggatgaacctggaggacagtacttatattaagcaaagtaagtcaggcacagaaagacagtaacaatgtgatctcacttgtgtagaatctaaaaaagttgatctcatagaagttgagaatagtgcttaccagaggcgaggggaggggagacagggagaggttggccaactggtacaatattatagtcagatggaaggaataaattcaccttatacctcataaataggacaattattattattattattttttgagactgagttttgctctatcatccaggctggagtgcaatggtgcaatctcggctcaccgcaacctccgcctctcaggtttaagcggttctcatgcattagtctcctgagtagctaggattcaggctcccactaccatgcccagctaataatttttgtatttttagtacagatagggttgcaccatgttggtcagctggtctcgaactcctgacctcaagtgatccaaccgcctcggcctcccaaattgctgggataacaggcgtgagccaccgcacccgaccaatatgtacaattattacatgtcaattataaacattatgaataatgctccattgcctcagcacttacatcaaatacacaggttataaaattataaaattctggccgggcacagtggctcacgcctggaatcccagcactttgggaggcaaagacgggcagatcatctgaggtcaggagttcaagaccagcctgatcaacatggtgaaaccctgtctctactaaaaatacaaaattagccaggcgtggtggcacatgtctgtaatctcagctactcaggaggctgaggcaggagaatcgcttgaacccgggagatggaggctgcagtgagttgagatcgtaccattgcactccagcctcggcaacagagtgaaactccatctcaaaaaaaaaaagagattatttaatgcctgttacattctatagcactataaaacaagaaaaacccatgctacatgctacagtgatacaacaacttagtaggctgcccaaggtcttgaaatatgtcatctctaggccggacatggtggctcacgcctgtaatcccagcactttgggaggctgaggcgggtggatcatgaggtcaggaattcaagaccagcctggcaaacacggtgaaaccccatctctactaaaaatacaaaaattagctgggcatggtggcagacacctatagtcccaactactcaggaggctgaggcaagagaatcgcttaaacacgggaggaggaggttgcagtgagccgaaatcgggccactgtactccagcctgggcagcagagtgagactccatctcaaaaaaaaaaaaaaaaaaaaaaaaaagaaaagaaaaagaaagaaatatgccatctctaatgtcaaacatctacctatttttaattatttgggttttttcccctgtcatttttagcaacggggatattttgggattcatgtatgtgaatccgctgaatgaatgcttaggcagatgacaaacctgaggaactgtctgctccaacctgtaacacaaagatttccacctgataaattaagataagaagttacctaaccaactatattttgctgaaaagcaaaaaagccactgaaagctccgcaaactgtctacaagtcacagggtacccagtctagcacatacagggcttagtccccaaggctgagggcctggacctaggagaaaatagagcaggcagttccatgactatcatctaaaagtcaaaatgactagaaagaaaaaaaaatcacgacataaccagtgtctcaacagagaaatgatctttaagccatagggctggctacatggaaaagagaatacagcgtaatatcaaaacagctactgaatttagagcacaaggaaaataagaaaaaaaagcagatttttgaaaaatttcttctaaccatctaaaattcaaattgcagctatggctcaggtgaaaaaaacagtgctgcagtaaaacatcagcacctctacggagtaatcaggacggtattaacccccacctctctgaaaacaagaaaagccaggaggtaccattaaaagaacaggctaggccaagcacagtggctaacacctataatcaatctcaacacttcaggaggtcaaggtgaaaggattgcttcagcccaagagctggagaccagcctaggcaacataacaagactcgatctctacaatttttttttttaattggccaggcatggtggcattgagcctgtggtcccaggtacttgggaagttgaggtgggatgactgcttgagcctggaaggttggggctgcagtgagccgtgatcacgtcactgcactccagcctgggcaacacaaaaaccctgcctccaaaaaaaaaaaaagaccagtccagcccaggtggagtgctggctctgcacaaaatagctgtgcagaccttgggcaggcctccaagtctgttttcacaccataaaacaatgtagcagtatctaacagaagtttctgcgaaaattacatgagatcatatgagctgttcacttatcagcaccaattgcaaagcaaaggttaatgtttaagaggatgccagaaggaagaaaggataaagctcagtcttaagaattctactccagcacggctcagccttgacgctttgtatctggggccaggtcattctttgctgaggggcaaagctgccctgtgtactgcaggaatgtttagcagcaacactgccctctattcactagatgccagctgtactaccaccaacatggtaacaataaaaaacatgttcggccgggcatggtggatcatacctgtaatcccagcactttgggaggccgaggtgggtggatcacgagatcaggagttcaagaccagcctggccaatatggtgaaaccccgtctctactaaaaatacaaaaattagccgggcgcagtggcaggcacctgtaatcccagctacttgggaggcttaggcaggagaatcgcttgaacctgagcagcagtgatttcaatgagtcaagattgagccactgcactccaacctgggtgacagagtgagactctgtctcaaaaaaaaaaatgttcaaacattaccaaatggcgagatgcgggtacaaaatcaccccactattcctctactttttttatcattctttctgcagtttttacctatttttccttccccaaaatttgaaaaccaatttgttctctaacttgattcccaacttataatcttttccttcctctattcaaaataatttcttcctcctgatttgcctatttcagttaacagtagtgcctttttcccactcacccaggctcaaaatcttcctcgtttccaatggcctggtcctctccctatctcccaaattctctcctcctttccattctcaatgctcctgcccaaatgtatatcctcccccaacccccactacagcagcctcctctctggtctcccagcttcttgatccctctctcctctatgctatcccctaggccaccttagaaagtgtttctaaaatacaaatttcaagccgccactgtccttagcacagtccttggaacacagcatgcctctgcctacccttcccacctaggaggtccttccaccaggcatggtcagaagtactccctcccactttctcataaagtgcttgcatcccttctagcccacgctgactcccagtcaatactcgacaaaaagagtactaggcacattaagatgtgtaaatacattacgaaagacacggaaattacgatctcattgtggaaaactaaagataagggttgtgccccaccacgcagcagaacgaggagattccctgccactgacagagaatggagagatcctggaaggacgctagacaggctgacggggctccactggaggggaaaacaggaaggagaacgtgggcatcactgaaagcaatatatgacagataacagaagaagtgcttttattattattattatctaaattctactcctagctgggtgcagtggcacacacctgtagtcccagctaatgaggagggtgaggtgggatgatcgcttgagcccaggaattccaggctgcagttgagctatgatcccacaaatgcactccagactgggcaacaagagcaagaccctgtctcaaaaagaaagaaagaaaagaaataccactcaaccttctggtttccagtccagtatgtgtaagaagcttagaagtcgccacctgatcctaacaacatgtaaaaagctaaatcaactgaaaaatcaactcttaaagaaataaggtggctgggcgcagaggctcacgcctgtaatcccagcactttgggaggccaaggcgggaggatcacgaggtcaggagatcgagaccatcctggctaacacggtgaaactccgtctctactaaaaatacaaaaaattagcctggcgtggtggcgggcgcctgtagtcccagccacttgggaggctgaggcaagagaatggcgtgaacctgggaggcggagcttgcagtgagccaagatcatgccactgcactccagcctgggtgaccgcaaggctctgtctcaaaaaaaaagaaatgaggttaagggggaaactgctgcctcccaaattggacagacagaccggcagatacagagaatcacagtttactggagcaaaatcctccaccaaatcagcactagggtaggaaaaccttaactataactaacaaattgccggaggctcagtgtggacaactgtgagagtttaaaactccaggagacccaattactggggagccccattctttgacgagttttacctccaggagctctacgagttccttacagtgaaaactgagggggggaaaaaatcccttcatgcttccagcagagggaggggcaaagaaacctttccttttttcttttcctttttttttttttttttttttgagacagagtctcgctctgtcccccaggcaggagtgcagtggcgcgatctcggctcacagcaagctccacctcccgggttcacaccattctcctgcctcagcctcccgagtagctgggactacaggcgcccgccaccacactgggctaattttttgtatttttagtagagacggagtttcaccgtgttagccaggatggtctcgatctcctgacctcgtgatcctcccgcctcaggctcccaaagtgctgggattacaggcgtgagccaccgagcccggcctcttatatttttaaatacgacagaacattctgttcttaacaaggtctgccctcaggagaaattattttgccagtgtctaacctgttgggattttctcagagcctaaacttcctgagagagggcaaatacacaattccagccccctctggccattctgtcccacctaagcggggaggagaactaagaaaaatgggtaaagttcacagtctaggtgcacaggctcaccaaaagactgagacctcaccataggactataggttaaacattcaaaaatcaacaataggctggatgtggtggctcgtgcctgtagtccagcacctggggaggccaaggcaggtggaccacttgaggtcaggagttcaagaccagcctggccaacatggtgaaaccctgtctgtactgaaaatacaaaaattagctgaatgtgatggtgcacacctgtaatcccagctactcgggtgactgaggcatgagaattgcttgaatccagggagtagaggttgcagtgagccgaggtcacgccactgcactccagtgtgggtgacagagcgagactctgtctcaaaataaaaaataaaaaataaaatcaattaatataatctatcacatcaacaggctaaagaagaaaaatcacatgatcatatcaatagatggagaaaaactatctgacaaaatccaacacccactcatggtaaataataaactctcagaaaatgaggaatagagaggaacttcctcaacttgataaagaacatctataaaaaacctacagctaacattatacttgatgagaaagtcacagcttttctacgaagaacaggaacaaggtaacaatgttccccctcaccacttttttccaacatcataggaagtcctaactaataagaaaaggaaattaaaagtatacagattaggaagagagaaataaaactttgtagatgatatgattatctatgtagaaaatcagaaagaagtgaaaaaaaatttctggaataagagattatatagcaggactgcaagatacaaggttaatacataaaagtcaaccagtttcctacataccagtgacaaataagtggaatttgaaattaaaagcacattaccatttatatgagcacccccaaaaatgaaatacttatatataaatctaacaaaatgtgtattttgttatgtcactcaatgtgtattgagtcatgggtaggaagactcaatattatcaagatgtcggttcttcccaacttgatctgtagatttaatgcaatcccaatgaaaaccccagcaagttattttgtgaataccaacgaactgattctaaaatttacagggaagccaggcacagtggctcatgcttgtaatcccagcaatttgggaggccaaggtgggcagatcacttatggtcaggagttccgagaccagcctggcaaacatggtgaaaccctgtctctactaaaaatacaaaattagctgggcgtggtggcatgcacctataatcccagctactcgggaggctgaggcaggagaatcgcttgaatccaggaggcggaggttgcagtgagctgggatcacgccactgcactccagcctgggcaacagaatgagactccatctcaaaaaaaaaaaaaatgataataataataaagtttatcaggagaggcaaaaaacctagaatagccaatgaagaataaagtcagaggaccgacaatactcaacctcaagaatcattatgaagctacattaattaggccaggcgcggtggctcatgcctctaatcccagcactttgggaggccgagctgggcagattacctgaggtcaggagttcgagaccagcctggccaacatggtgaaaccctgtctctactaaaaatacaaaaattagctgggcgtggtggtgggcgcctgtaaccccagctactggggaagttgaggcaggaaaattgcttgaacctgggaggcagaggttgcagtgagccgagatcgtgccattgcactccagcctgggcaacaaaagccaaactccatctcaagaaaaaaaaaaaaaatgagccaggtatggtggtacacacctgtaatcccagctactcaggaggctgaggcatgagaatcacttgaacccgggagacagaggttgcagtgagccaagatcatgccattgtactccagccaagacactatctcaaaaaataaaaataaaaaagctacattaattaaaacagtgtggtattggcaaaagaaaggacaaatggatcaatggaacagactagagagtacagaaatacactcacatagtcaacagatctttcacaaaggagcaaaggcaatacaatgtaacaaatgtcttttacaacaaaccatttgttgtttcaacaaatggtcctggaacatgcccggagcggtagctcacacctgtaatcccagcactttgggaggctgaggcgggtggatcacttgaggtcaggagtttgagaccagcctgaccaacatgaagaaaccccgtctctactaaaaatacaaaattagccaggcgtggtgacgcatgcctgtaatcccagctactcaggaggctgaggcaggagaatcgcttgaacctgggaggtggaggttgcggtgagccgagatcacgccattgcattccagcctgggcaacaacagcaaaactccgtctcaaaaaaaaaaaaaaaaaaaaaaaaagtcctggaacaacgggacgtccacatgcaaaaaaaaatctagacagacgttacacttcccaaaaattaaatcaaaatggatcataaagctaaatataaaatgcaaaactagataatttcttgatggtaacatagaagaaaatctagatgaccttaggtatggtgattgcttttatttatttatttactttttttgagacggagtctcactcttgtcgcaacagtctggagtgcagtgccgcaatccaggctcactgcaacctccgcctcccgggttcaagcgattcttcctgccttagcctcctgagtagctggcattacaggtgcccacgactacaccagactaatttttttgtatttctagaagagacagagtttcaccatgttggccaggctggtctcaaactcctgacctcaggtgatccacccatcttgtcctccccaagtgctggaattacaggcataagccactgcgcccagccagattacttttagatacagcatcaaaagcatgatccatgaaagaaataattgataggccagacttcattaaaattaaaaactgctttgcaaaagatactgtcaagagaatgaaaagtcacaaacaaggaaaaaatatttgcaaaagacacatttgataaaggactgttaacaaaaatatataaagaactcttaaaactcaagaataggaaaacactttcccactcaagaaggtgtggcaggtgcctggcacggtggttcatgcctgtaatcccagcacttcgggaggccgaggcaggaggatcacgaggtcaggagatcaagaccatcctggctaacacagtgaaaccccatctctactaaaaatacaaaaaattagccgggcgtggtggcagccgcctgtagtcccagctactcgggaggctgaggcaggaaaatggcgtgaaaccgggagacggagcttgcagtgagccaagatcgcaccactgcactctagcctgggcaacagagcaagactccgtctcaaaaaaaaaaaaaaaaaaaaaaaaaaaaagaagctgtggcaggaaaaaaaaaaacaattaaattaaaattttaaaatgggcaagaagctctgtggcatgcccctatagtcccagatacttgggagactgaggcaggaggaccacatctgtgaatacccactacactcaagcctgagcaatgtagcaagacccagtttcttaaaaaaataaaaaggaaaaagaaaaagacacaaactgacatctcatcaaagaagatatacagatagcaaataagcatctgaaaagattttcatcatatgtcattagaaagttgcaaattaaaataagatacctgactgggcgcggtggttcacgcctgtaatcccagcactttgggaggccgaggtgggcagatcacgtgggtcaggagttccagaccagcctgtccaacacagtgaaacccacctctactaaaaatacaaaaaattagccgggcatggtggcaggcgcctgtaatcccagctactcaggaggctgaggcagagaactgcttgaacccgggaggcggaggttgcagtgagccaagatcacaccactgcgctccagcctgggcaaaagagcaagactctgtctcaaaacaaaaacaaaaaacagccaggcgcgatggctcatgcctgtaatcccagcactttgggaggccgaggcaggtggatcacctgaggttaggagttcaagaccagcctggccaacatggtgaaaccccatctctaaataccaaaaattagctaggcgtagtggcaggtgcctgtaatctcaagaactcaggaggcagagacaggagaatcgcttgaacccaggaagcggaggttgcagcaagccgagatcgcgccattgcactccagcctgggcaacaagagtgaaactctgtctcaaaaaaaaaaggaaagaaaaagaaaatgagagaccattatacgcctaccagaatgaccaaacaccagaatgctgacaccaccaaatgctagtaaggacatagaataacaggaaatctcattcactgctggtaggaatgcaaaatgttacagctactctggaagacagtttggcagttccttacaaaactaaacgtaactctcaccatatgaccagcaatcatgctcctaagtatttacccaaatgaattgaaaacctacacacaaatgtttagagcaactttattcataattgccaaaaccgtgaagtaacccagatgtccttcagtagatgaatggataaataaactgtggtatatccagatgacagaatactactgagtattaaaaagaagtgagttatcaagccatgaaaagacacagggaggctgggcacaggggctcacccctgtaattccaacaccttgggaggccaaggcaggcagatgacaaggtcaggagttcgagaccagcctggtcaatatggtgaaaccctgtctctactaaaaatacaaaaaattagccaggcggggtggcacatgcctgtaattccagctacttgggaggctgaggaaggagaattgcctgaacccggaaggcggaggttgcagtgagccaagatcgcaccattgcactccagcctcggcgacagagcgagactctgtctcgggaaaaaaaaaaaaaagaagaagaaaagacaagacaagacccagggaaactcagtgcatattatcaagtgaaaaaagccaaactgaaaagacttacatactgtgtgattccaattctatgacattctggaaaaggaaaacctatggagactgtaaaaagaccagtgattggctgggcttaggagggaaagagggataaacagacattaagtagaggatttctagggcagtgaaactattctgtatgacactacagatggtctccaacttatgatggttcaacttatgatttttcgactatacaatggtacaaaggtgatatgtattcggaagaaaccatacttcaagtaaacatacaaccattttatttttcattttcagtaatcaataaattacatgaaatatttaacactttattataaaaacagactttctgttagattactttgcccaactgtaagctaatgtgtaagtgttctggcaaattaaaggtaggctaggctaagatatgctgttcagtagattcaatgtattaaatgcatttcaatttatgatggtttatcagggcataaccctgttgaagtaagctcatcatgtaaagcagcatcaatacaatggtggatacatgtcattatacggtggccaaaaaccacagaatgtacaacagcaagaataggatgtagtgtgttatggactctgagtgataatatgtcaatgtaggttcctcagttgtaacaaatgtcccattctggtgggggaagttgagaaaggggaaggcagtgcctgtgtgcaggcagggggttatatgggaactctctgtactatctgctcaattttgctgtgaacctaaaactgctctaaaactgggcacagtggcacacacttgtaatcccagctactaaggtggctgaggcaggagggaccacttgagcccaggagttcaagaccagcctgggtaacacagtgaaatcccccatttctaaacaaacaaatacaagttgctctaaaaaatatagtgtattagtttaaaaaggaagaaagaaaaagaaagccagcaagccagccacccaaggaacaaaactttccagtaaaaacaaagtgtaaataaaattgtatcttgaaaaatgaaattgaaaattgtttctgttcttatatgtaacataatttaggttataatacaactacatatttatgtttaatttgaaaagcaaacgtttaaaatgaaaagtagggagtttgggcacaatttttccaaaaaaattatgatggcaccataagacacaattaacttcctatgtgagttttactgcattaattttacagtatctgaggacttggccagtcttttcatgggactctctccatcttttgatatgattctattttgcagggcccaaggtagcatcctcctcaatggttttcttttcactgttagtgggtctgtggaacgtaatgtcaaaagatgtgtgtgaaacttagtctccaacatttcattcattgaacttcatgaaatcttgtatccttcacaagattttaaacttcatttcacaactgctgtgaccttatcaatcagcaatgaaaataacaaactctaagctgggtgtggtggtttacgcctgtaatccctgctctttgggcggaggcaggcggatcacctgagcccaggagttctataccagcctgggcaccatggtaaaaccccgtggctaccaaaaaatacaaaaattagccaggtagccaggcgtggtggctcatgcctgtaatcccagcactatgggaggccaaagcaggcggatcatgaggtcaggagttcaagaccagcctggccaacatgtgaaaccttgtatctactaaagataccaaaaaaaaaaaatttagctggacatggcatgtgactgtaatcccagctactcgggaggccgaggcaggagaatcgcttgaacctgggaggcagaggttgcagtgagccgagatcgcgccattgtgctcccgcctgggcaacagagcaagactgtcttaaaaaaaaaaaaagaaagaaagaaagaaaatgctaataacatactattgatttgataggcagggacagaagttagtattaagttgtgatgtctggaaatgaacaaattttctaagtggtcagctcattaacaacaactctcatgttaggacaatttttatttttccctataccactcatagttgaagagactcagacaaggatctccgttcatcacacagcaaagaggccaacttaagctaaaaatgacaatttctacacttatccagttccggtgtgccaggcactatcctagtgctggagatacaaagatgaacgtgaaatgccctctaggaattcaatctaacaagagaatggaatgaataaacacacacacaaacgtgttaagggttgtgataacaaggcctgcatgtacaaagtgctaaggatgagacacagaggggaaagaaattcagtatgtctggttctctctgagttaagccttgaaagaggaattttaaaggaaacacaccaagggaaaggctgccaagcagagggtaggggcaaagaaaggcctggaaactgaaaacacaaagctcattcagaaaatgcaggctccagtgtaactagctcaatgttagttgctgtggttctggagaaggagtgattttaaaacagtaataacaaaaagaaccagtctaaaaagttaggccgggcagggtgcagtggctaacgcctgtaatcccagcactttgggaggccaaggagggtggaacacctgaggtcaggagttcgagaccagcctggtcaatatggtgaaaccctatctctaccaaaaatacaaaaattagccggatgtggtggtgcatctgtagtcccagctactcgggaggctgaggcacaagaatcgctcgaacccaggaggcagaagttgcagctagccgagatcacaccagcctgggtgacagagcaagactccatctcaaaaaataaatttaaaaataaaaaataaaaaggtaggccaaggctcaagtttagaccatgcaaacaagtttggattttattttccaatatttgagaaatccatagcaacaagatacagaatggattagaaggaacacacaaaatgcaagaagatcctaaggcacctcctgttctagtgtctaagcaaggacagcaaagggaccagacagaaggtggggatacaaaagtagctcatcaggtttgagttacaactgtgtgcagaggagggatttctgggggaatgcagagttagaaatgatcctggggctctggccaggctgctgctacaaacgcagagcgaaagcagaagcacattcctgggtggggaggagccaaagggttaaatttggaataggaatgcactgagttgaggtggtgaagtctcatcaactactgcagatgcactggcactcagtgaaacacggagctccagaaacggatcggggccaggtatggtggctcaggtctaaaatcctggcactttgggaggctgaagcggaaggactgcttgagctcaggagttcaagaccagcctgggcaacatggcgaaaccccatctctacaaaaatacaaaaattagccagtaatggtggtgcgtgcctgtagtcccagctacttgagaggctgaggtgggaggatcaccagagcctgggaagtcgaggctacagtgagctgtgatcacaccactgcactccagcctgcgcgacagagtgaaaccctgtctccaaaaaaaaaccaaaaaccagaatcagattgggaaatgtcagtaaaatttgatagctggagccataataactgcaactgcctatggagaatcactgaatttcaaccagacgaattcctctccttctccgcacctccaaatgcccttgtgtcttttttaaaagctagacatcacccactttcccatgtcctaaatcacctttttttctccttattaaacttattccataactacgttctctttcagaacacaggactgagagagtgtactcttgcaacattatgtaaaaaggtcatccaatccaaaaggaaagctgtgttttccaagactgctaactcctggagaaaagaaacaagacatcctcaatgctttcctaataactggtttgagcaaaatgcaaaagtttaactgctgagtgactctccctggagaaagccatgaaaatatcttaaggctggatctagggtgtccaaacattttcacaggccgcaggctagagcactggtgcaggagaaggggacaccagagacctggcagttcaggctttgaaggcagtaaacagccactgacctcaggcaagtcacttctcctttaggttttccatttcacagactgatgagtacatggcctaaaatgatcgcccttctagttgagaattttcaggcctaactaaaagtagattaaagtaaaccttggagagagctgaattttttttaagtgccattaagcaattcagggattatctaaacagcctcggttttcttttctctgcttccttaccaactgcctattaactctcactcttagctcataagcagtcagaggggctgaagcacaaagaggaagtgaagctcaaagagttaattttgctgcattagcggctctggtgaaagacagtgggcacagaaaaggaatcaaatgaccaaaactggacttggggattactggtggcagccagccagcaaatttctagatactgcacacaacctgtcagccaattaaaagaaaattggcagaaaatgacggaacacgttctttgtttttgtttttttgagacagtctctctctgtcaaaggctggagtgcagtggcgtgatctcggctcactgcaaccgccgcctcccaggttcaagcgattctcctgcctcagcctcccaagtagctgggactacaggtgtgcgccaccatgcccagctaatttttgtatttttagtagatatggggtttcaccatgttggccaggctggtctcgatctcccgacctcgtgacccgcccaccttggcctcccaaagtgctgggattacaggcgtgagccactgcgcccggcccgggaacacatctttaaaggtctcaatagaaggatgcacacactacgttgaatggttatgtcttcggagcagagtggtgaaagaaggtcagacttctgttaagtctgaatacctacacgcgtacttctgtaattcaaatttaagattaaatattttcaagtttaaaaaaaggaaaaaatggccgagcgcggtggctcatgcctgtaatcccaacattttgggaggtcgaagcgggtggatcacctgaggtcgggagttcaagatcagcctaacgaacatggagaaaccttgtctctactaaaaatacaaaattagccgggcgtggtggcgtgtgtctgtaatcccagctactcgggaggctgaggcaaggagaatcgcttgaacacgggaggccgtggttgcagtgagccgaggtcgcgccactgcactccagcctggggaccaagagcgaaactccgtctcaaaaaaaaaaaaaaaaggaaaaaacatttctaccttactcttattttaggagccacgcctcccacctttgtctagtaacacagctatagtgatgtctcttaggggatgagaaaatgctactcctccactaacaatgactcttggagagggaacaagacatcaaatcgcgaactcgaaaaactaacagaaaaaagttaaaaagtggtttgtgtttttaaagccagccacaacaccttcattcaaggccctaaaccgcagagactttctagacctatcttaagcgtcagtaccacacgcacttcgtgatggaacggtattgttctcctagaacagacccgttttctcatgaaaccgacgtttttacaaaagcctgtttgtggacggcctgcggcggccgcgaacccgcttcccttggattacccagggctgggagaaggagggctttcgccggctgcggtccccggtccccggcctccgccccggccccggctcccccggcccccgacccccccggcccacgccccctgcccggaccccgccccggccccgccccgcgtcacctgactgtcccgcggcccccagacccggcgccaccgacctgatgacactgatgtggaactcgtcctcgcggaggccccgccaggcgccgggcaggaactccttgcaccacagataggccctgcgccgcgtccggggctccggctgctcgtctgcgggcggctgcggcggcgggggctggggcagcggcagcggcagcggcagcggcggcggagggggcagcgcgagcggcggctgttggccgcccagctgcttggactcgaggtcgctggcggcgtcgcgctgctgccccacgccgggcgccggggccgcgctgccgctaccgcagctcagcagcagcccgagcggcgagggctccgcctcgcccccggtgcagaatttggttttcatgcccgacaggcggccgaggaggcgcgggcggccgcagcgcgagaggactaggctcagagtccggccgggcgccccctcgccgctctctcactggcaggccggcggggcagggggccgcggcggttgggcgcgcggggcggcggcggcggctgcggcgactgcggcgactgtggagcggggatgtgctgctggccgctgcactcgctcctctgccgccgccgcacgaggagcgccggccgcgtcacagcccgccctcgcgctcgccactgattggccgccgtccgccggcccggcgcatcataaccgccgccgccctcgccacaccgcctccccattggctgcggcgccgcccccaacccagagcgctgcggcctccgtgagcggggcctgggcgaagggggcggggcgtcgagggggcgccccggcggtcgcagggaagggggagaggggagcgaggcgcggggggcgccgggagagcgcctccgcggtgggacggagccggactgggccgagcgagggaggctcctgagcctcggaggaccccggggttggctttgggagctgaaagtttccttggacccctcggaagccccgtgacatcagaggccgggcctggcaggggcaggcaggaaacgtgtctggaggctactgccctctccgcgtgaccttgggcgagcagcctcctcctggggctcagtgggtgtgattttgtaacatttcccagcgctgccacaggcgcgtctcgccctgtccaacgcggagcccgaagaattactaagaaaccgaggtctgaaggagggaagaggtgacgggctcgaggccacacggtgggccaggctgggcccggctgcacgccggctaccggggcccagccctctgcacgcctcccgcagcctcagtttccctgtccgtggtactgaggatgctcgggcctagaagttcagggctggaggcccagggaccgtcgagggaggggcatcatccccgccatggggccgccgcaactgcccagagcacaggccaaaggtgcgtgccacggggctactggcgttgtggacgctgcccctgcctccccatcccccgcaggaaacagccttgtgaccgtgactaacgcacctttgccggggtagaggggcaagggcccctgctaccgtttgccacacactgccccatgtccctcactgctcccgtccttcctagaagtgaggtgctgatacatataaaaattatggatcccattttatgggacatgagctgaaacaggaggtttcctgggctgccaggggcttaggaaatccagtgcctgatacacaggaaatgcttctatgtggggagttcacagtcttccagaagcaaaaatgttttttggttttttttttgagacggagtcttgctcagtcgcccaggctggagtgcagtggcacgatctcggctcactgcaacctccgcctcccgggttcacgccattctgctgcctcagcctcccgagtagctaggactacagacgcccgccacgacgcctggctaattttttttttttttttttttttttttttgtatttttagtagagacggggtttcatcgtgttagccaggatggtctcgatctcctgacctcgtgatccgcccgcctcggcctcccaaagtgctgggattacaggagtgagccaccgcgcccggccgcaaaaatcttttagagtgtgtacttggctgaacttgctccacgcaaaatggtcttatttaaggataaaaatgaaaggggacttttgtaaggctgctgtggcgacaggcctggaagttgacctgcagggaggtaggagagaccaaggcccctgggacggaggccggccactggatgtttgaaaggctgagaagccaagggcttcaatctggggaggccgtttggataaaggagccaaggactttctctaaaaataccggctcacagggaggtggggccatgccaatggcctgcccaggtgacaagccctttgtcccactgtcccctggcaccagtctggtaatctcaaaggaatgccagaaatctggccaggaggaagggacactaaagtaaggagtggccctctataatttgaaataactctttctggcatctgctggcttttgttaggaaaagcctcagacatttttatgggatcacagttccctgtgggaggaagaggttgcctcaaggccaggcatggtggcttatggctgtaatcccagcactttgggaggccaaggcaggaggatcacttgagccaggagtttgagaccagcctggccaacataacaagactctgtctcgccgggcgaggtggctcatgcctgtaaccccagcactttgggaggccgaggtgggcggatcacaaggtcaggagttcgagaccattccggctaacacggtgaaaccccatctctactaaaaatacaaaaaaaattagccgggcgtaggtggtgcatgcctgtagtcccagctactcgggaggctgaggcaggagaatggcataaaacccaggaagcggaggttgcagtgagccgagatcgcgccactgcactacagactgggagacagagcgagactccgtctcaaaaaaaaaaaaagactgtctcaaaaattaaaaatgaaaaaaaaaattaacagagcattgtgtcttacacttgtccgactacttgggaggctcagccaggagcatcacttgagcctgggaggtcaaggcacccactgcactccagcctgagtgacagagtgagaccgtatttgctgaatgaatgaatcagtgagctcctggctcagcaattattaacttatgactttgggctgagcctcggtttcctcaactataaaatggggattataataccccgagcatccaggattgagagaatgtatgcaaaatgcatagcatgcaagaagtaaccgtttggttgcgtgcagtgcattgcatggcgttgcctctgccagtggttggttttcggagatgaataatgcatgcacttgtagcatttcacagcttgggaagacagtgtcgtataagaaaagaatttgggccgggtgtagtagcttatgcctgtaatcccagcactgtgggaggccaaggtgggaggtttgcttgaggccaggagttcaagatgagcctgggcaacaagtgagaccctgtctctacaaaaaataaaataattggccaggcacagtgacatgtgcctgtaatctcagttacttagaagccggaggtgggaggatcccttgaacccaggagttcaaggctgcagtgagccatgatcacgccactgctctccagcctgggcaacagaggctaggaaaataaaaatacattttaaacaaaaataattcaaacactctgataaccaaaatgtcaatgtctgtgcacaagtagacgagtttgagagaaacttgctatggcaggtaattggaggttgttccaattaccaaaccttttcctctaggataagataaaaaaattatccaaaagctctgtgattgatgctgaattctgagagcagactcagagggtgggtgatgggccttaggagggatagaggaaagattgggaagttcccgtccactctgaatttcctgctgatgggttcctcggggtccacccacgggcctcagccctgccaccaactccaaggcctgttctgagaaagggctttgtgagtctgactccccccaagatgggggaacccactgtcaagcacctggtaggagcaggctttgagccctttcaaagatgctgcatacagcaagttccctaagcagcagtgaggtgagtgtcattagcacttcatctcccaggtggcaagggagcttcccaggggataaaaccattcgttaaaggccagcaggacctgggactccacccaggaccccatccaggggagccttgtccttctgtccttctgcaccataagcacctttggcccaggaagcactagacatttggcacagtgggggttccctcacgggctggagaagcagagccctggcaaggctgtgctcacacctcctcccaggtcacacccaggaccaagcacccctgctccagttctgagccttaaaatattgatgagagcacagaggccacctggctgcaatcctccatgttgaagattgggttgcagtgccagctagcagagtgacatggagctgggctttccctgagtgctgagcgtggccccagcccagctctgtcagcgaaaggctgtgtaggtccagcagctttctggaggtctctgagcacaagtgtggtctgacttggactgacccttctaccatacatttggctcagcacccgcagccagagtctagggcccacagggctcagaggaagcaggtgactagaatatccatctgtctggtgggtggggcaggcattcctcctgtcctcatttgcagggattttgagtataatattatgggtaaaaattctggccaggtgcagtggctcacgcctgtaatcccaacactttgagaggccaaggtggatcacctgggtcaggagttcgagaccagcctggccaacacggtgaaaccccgtctctactaaaaatacaaaaattagccaggcatggtggcacatgtctatagttccagctactcgggaggctgaggaaggagaatcacttgaacctaggaggtggaggttgcagtgagccgagatcatgccactgcactccagtctgggcaataaaagcaagactccataacgcgcgcgcgcacacacacacacacacacacacacacacacacacacacaatctttagaggtcatgctgccacccactgtgtgaccttggacagaacatctacctttctaagccactttcctcatccccaaatggagtcctactctacagggctgttggggagattcaccgaaaccagcaaggaaagagctgggtgtagagccaaagccccacaaagggtatctatgcttttcagcttattgttagctggattcccagagcctggcagagagcagcaaatacccattcatcctaagtgccagtggaagcgcaaagcctgcaggagctctggcaggtctaacagggcctggagagttttccattctttgaagctcctggcacattcaaaaattaagaaaaatctaggcgggacacggtggctcacgcctgtaatcccagcactttgggaggctgaggtgggcagatcacctgaggtcaggagcaagactccatctctaaaaaaaaaaaaagaaacatctcgacagggttaccaaaactggggcatgtttgaaatacttaaattgaacaaatcagtgcttttaacacacatgcaaaagtcccattcaagataattttgcaattctcaaggtaatagagggattactttaaaataataatggagccaaccaagcatagtgacacctgcctgtggtccaagctactggggaagctgaggcaggaggatcacttgagcccaggggattgaggctgtagagacatgattgagccactgactccagcctgggtgacagagtgagatactgtcaataataataataataatggtttgtagagcaccttaagtggtatggtgtgacaaacatctttcaggcctgacaacagatctctgtactaatctgattatccttattcagatgtatctaaatctgaggcccttggggcacatgattgcctcctggggctgccatagtagaccctggcaatgacctagtgaccgttcctctactggagatgatcccctgggcccctcagaatgcatttcctgtgtccacatagccggtgttttaagtcaggtgatctttttttttttttttttttttttgagacgaggcctctctcgttgcccaggctggaatgcagtggtgcaatctcggctcactgaaacttcttcctcatgggttcaagtgactggcctgcctcagtctcccaagtagctgggattacaggtgtgcaccacaacgcccggctaattttggtatttttagtagagatggggttttgccatgttggccaggctagtctcgatatctgcccacctcagcttcccaaagtgctggaattacaggcatgagccaccgtcgccagtcttaagtcaggcaatctaagctccctttccaagtttgttgaaaacctgatttgaggttttgtgctttaagcttgcattacatttgtaacacaataaatgcaatttttggcacaataaatgcaaaattgtggcgcagtgactcatacgtgtaatcctagcactttgggaggccgaggcaggtggatcacctgaggtcaggagttcaagacaagcctggccaacagggcgaaaccctgtctctactaaaaatacaaaaattagctgggcatcgtggcaggtgtctataatcccagctatttaacaggctgaggcaggagaatcacttgaacctggagggcagaggttgcagtgagccaagattgcgccactttactccagcctgggcaaaagagccaaactctgtctccaaaaaacaaacaaacaaaatagaaaataaatacaatttttaaaaagaccccagtcatcatgcaggttacactgtggggataacacttctgggctaggagttgggcaacctgggttcaggcaccgcaccccctctgccggctgcacagggcccctctcccctcagtcagccctgggccctgcaggctggacttttgcctggtagctttgggctggccctcccttctgcaggggaccccttgtacagatgggtaagcagaggcacaggggcacaggcaggacagcggctctgctcacgcaggatgccatggccagtcgtgggcctactccatccttgatcctcccctcccaagggcacttgccatccaggcctgaatggcaagaggcccctaaggggcccccagtcctgtcggcaccccctttgagtgactgacagggaggcaggggagctggcagcccccatccccacaccagcttgtggaagctaccagcgatcggtggggccccactggcagcccgtccgtgtagccttggccgggcccccaagcttcttagaatgccatctaagaaggcagagggggatgagcggcggcggggaggaggggcaggccttgggaagatccactgggtcacagggaagcgaaggcggaccctcctcccccagcgctactgcccgggccgaattccaaggccagcggctgcccgctgagaaggaatccggaccaacgggattctggcttccctctggcccctcctggcgagagcggcgccgggaggagggggcctcagaaggggcgggcaggggcggggcccgcggggtaggcggagctcccaggaaaacagcgggcggggcctcgcgcgaggggcggggttggcggcgaggcgtcccaggacccccattcctccctccgccccggggcttctggggagcggcgcagcttgactgccaccgactgcgggcctccctgccctacaagcccccacccccgcccccccttgggacctggcgaggagttgccccgcaaagttggggctggtgcggggttaaggggattacaattttcctaggacttagtgtgctgaagctgcttttgcgattagaatttatatttacaatgctgataacaataaactacccaggctaccgcgccacgtggacgggggtggtggatggaaagggaaacccttggccaccagcagcctgtgataaggccaaggttccctggctggattgctgcctaggatgcctgtggtccctacccccgcccgggaggcaggattgactaatccgaccaagcaaggcctccaggctgggccaagaaccccttcccagtcctctcccaaagtctatgtccttgggctcacgctgtcctctcctgtccttgcctcctgcatctacagacccctgaggccccctcctccttcagagcatgcacgtcgcaaattctcaatgactgtttggaggaatgaataaatgaattgtgaacaaatggtctgaagattccagaggtagcctaatggggccctgctgcttgagttctaatcccagccccaccagttgttggctatttggccctgggcaggtgattattctctctttgcctctgtaccttgcccgtaaaatgaggagaataccagtacctactgcataaggttgttaaaggattaaatgagtgaatagttacaaagagcctggaacagagtgttcaaagaaacacacagccacagtattaaaaaaattaaaaacccatttctctccaggcttctgccatcactctgtgtgacttcaacattctacctgcatgacctatgcagcacctggccgctgttaccttgccaccctcactgacatcttctctgcataggccttccaccatgccctgtactttctccccactagaaatagccctggctctgaaatgtgttttaatcatcccactttgggtccaccagttcctagcctttgagcttaggcctctcctccaggaccctccctggctacgatttcccaacccctctcgaccttccattcactgaccttgccactttcttgcctcttgtctgcacctctccccatccctagtgtggattccatccccttgtgaacgctgccacccgtcctggcagagactcagtacttccactctctgaatgcatttcttcttcctaggcacaccagaagactacatttcctagccccccacccccttgcagtgtctgggaccatgtgactccttaattaggtcacttctctctcctgggaggccctctctgccctctctaagtctaactagtggcaaaggatctaagggaagaaacctggcagagttactagtcccaagaagcctgggtccctgaatcaccacatggaagtctacgcgcccaccacctgaatggactaaggtatgaacagaagtaatacacacccctttagggccaaggaggtgaaacagctggtatgccttcctcacactctcctctgctttcctggtgacctaggaagctgcaggatgaagacaacagcatcacaaggaggaagccaggatccctgtgttaccacaaggaggagagatgcctaaccaagaccgtctgcaaggattttgtgtgagccagaagcagagctgtatggtgttcagccactgagatttgagggctgtttgttacagcagttgacctatcctgactgacacatcacatcattcctttccccaccatgtgtctaacatgctaccaaattgaattttaagtaaattagtacttataaattaagtacaaatgcttttcaaattcacatgaatctttggtaaataaaactggttgtaaaattattgataaatatagaaatgtctgaaattattgataaaatagccttgtgcaagtaagactaatttaagatcattggttcaatgaaaataactgaatcttctgagttgtcggcaaaatgctcatgtgtttaagattcttagataggtgttcacttaatattcagactttaaaaatgattaaccaggatataactttgaccagcctagtatcatagtttttataagtaatcctgggccgggcacgatggctcatgcctgtaatcccagaactttggaaggccaaggtgggtggctcatgaggtcaggagatggagaccatcctggccaacatggtgaaactccatctctactaaaaaaacaaaaaattagccaggcgtggtggcacgtgcctgtagtcccagctactcgggaggctgaggcaggggaatcacttgaacctcggaggtggaggttacattgagccgagatcttgccactgcactccagcctgggtgacagagtgagactccatctcaaaaaaaaaaaaaaaaaaaaagaattgtggaatcctgctgggcatggtgactcatgcctgtaatcccacactttgggaggccaacgcaggtggatcacttgagatcaggaatttgagaccagcctggccaacatggtaaaacctcatctctacccaaagcacacaaaaaattagccaggcatggtggcagacacctgtaatcccagctactcgggaggctgaggcatgagaattgcttgaacctgggaggtggaagttgcagtgagccaagtttgcaccactgcactccagcctgggcaacacagcgagactccatgtcaaaaacaacaaacaaacgaacaaaaagaattgtggaatgctgctcatccataaaatgctaatatctaatgggcatttcaggatttcttgctttctagatttatataaaatgtgccaaagatgtgttcttattgagaaaaagaagaattttgtctaattcagaagttatctgcccagacgcagtggctcatgcctgtaaacccagcactttgggaggccaagttgggtggattacttcaggtcaggagttcaagaccagcctggccaacatggtgaaacacatctctactaaaaataccaaaaaaaaaaagttatctaaaagtcaattcaaattatggagttaaaagtggttcttggccagacgcagtggctcacacctgtaatcccagcactttgggaggccaaggcaggtggatcacctgaggtcaggagtttgagaccagcctgagcaacatggtgaaaccccatctctactaaaaatacaaaaattagctgggtgtggtggtgggcgcctgtaattccagctactcaggaggctgaggcaggagaatctcttgaactggggaggcagaggttgcagtgagctgagatcatgccattgcactccagcctgggcgacaagagtgaaactccatctcaaaaaaaaaaaaaaaaaaaggtccttaaacaaggttgaaagaaaccattaagtaggggagagagagatgtgaaaaaaattatggatacaaagatgtatttttggcaaagaagcttataaagaaaagacaatacctttatatgagaaaggatcttgtatggaaaattattgtcctagagtagaatgactggttatttaagaaagaggaaggccagatgtggtggctcacacctgtaatcccaaaactttgggaggctgaggcagggggatcatttgagctcaggagtttgagaccagcctggggaacatggtgaaacactgtctccccaaaaatataaaacttagctgggcatggcagcatgtgcctgtagtcccaggtactcgggaggctaaggtgggaagattgcttaagccgaggagattcaggctgcagtgagccaagattgtgccactgcatttcatcctgagcaacagaacaagaccctgtctttaaaaaaggaaagaaagaaggaaggaaagaaggaaggaaggaaggagagagagggagagagagaggaaggaaggaaggaaggagggagggagggagggatggagggagggagggagagagagagaaggaaggaaggaaaggaaggaaggaagacagagagaagctgggtgtggtggctcatgcctgtaatcccagcactttgggaggctgaggcgggtggatcacctgaggtcgggagttcgagaccagcctgaccaacatggagaaaccccgtctctactaaaaattcaaaattagctgggcatggtggcacagacctgtaatcccagctactagagaggctgaggcaggagaattgcttgaacctgggaggcggaggttgtggtgagctgagatcacaccattgcactccatcctgggcaacaagagcaaaactccatctcaaaaaaaaaaaaagaaagagaaaatgaagaaagagagaaatagtctaggacaagtcagaaagtccaagcaggacatagatggtttgtgtaagttgtgataagatttgtaaaggggaggccgggcgcggtggctcaggcctgtaatcccagcactttgggaggccgaggcgggcggatcacgaggtcaggagatggagaccatcccggctaaaacggtgaaaccctgtctctactaaaaatacaaaaaattagccgggcgtagtggcgggcgcctgtagtcccagctacttgggaggctgaggcaggagaatggcgtgaacccgggaggcggagcttgcagtgagccgagatcccgccactgcactccagcctgggcgacagagcgagactccgtctcaaaaaaaaaaaaaaaaaaaaaaagatttgtaaaggggaatttacaaaaacaggaattttgtttgtgattaagttagctgcgattaaaaggagattatttctcctttctaaggaatggtcccctatgttaaaagaaggtctgcttaaggtattgatttgctcttaatgaaattataagaaattttgcttttcaattttttgtttgttagttttgagatggagtctcgctctgtcgcccagactggagtgcggtggcgtgatctcagctcaccgcaagctccacctcccagggtcactccagcctgggcaacagagcgagactctgtctaaaaaaaaaaaaaaaaagggatgaatgagtgcctgtccacctccatttcatctggcctagcatatttaactgtctacacgtcttttgattctaagtctcttggccacagcggtcccacttagggacataatatagccagggcaggtagcacaccaccctggcatcgatatggggcacaataaaagcttggccatgatactgcctctggcataccatgaccagaaaaaaaaaaaaaaaaaaaaaaaaaaacacatgcacctgaaaatctagttgaggccatgacaggaagtgggtagggggagggagagtcagccaggcctcactatatttcctcgccttggaattccacacatattttccctgatggtaccaccaattataattcttcttgtcccccttggagggccttagtccctctacaaacaacagtgtctttctcaattcccataactgctccccataatactggtatcacattaaattactactttccccccatcccattcatgcttaaaccaaagcaccccttgaataacacaggtacttaacctttttttttttttttgagacacagtcttgctctgtctcccaggctggagtacagtggcgtgatcctcagcctcccaagtagctgggattacaggcatgtgccaccacacctggctaattttgtatttttagtagagacagggttttgccatgttggccaggctggtctcaaaactcctgacctccagtgatccgcctgccttggcctcccaaagtgctgggattacaggcgtgagccactgcgcccagcggtacttaaccttaacagctcccatcccattccagtctgtgacccacagtggatatctgtggctatatggatgcccactaaatcaatcagcctataaacaactcattcctcatttgagaccacgggtaccaatgtgttgataacatttggctcaaaggtcaacatatagtaagacaggtgaagccggccgggcgcggtggctcacgcctgtaatcccagcactttgagaggcctaggcgggcggatcacgaggtcaggagatcaagaccatcctggctaacatggtgaaaccctgtctctactaaaaatacaaaaatagagtcgggcgtggtggcaggcgcctgtagtcccagctactcgggaggttgagacaggagaatggcgtgaacccaggaggcggagcttgcagtgagccgagatcgtgccactgcactccagcctgggcgacacagcaagactctgtctcaaaacaaaaacaaaaacaaaaacaaaacaaaacaaaaaaaagacaggcgaagccttctaatatacaattatacaacatcacttgcccaagcactaagtgagcaattggccttctgttgtctggggtcagggctgctgtgggcttgttggccccatggggaggatttgcctaacatgaggcaactcttcaaaactttacttttcactctacataccttcttataaaatgggagatactttagataaattgagactctctcgattctatagcagatatagttatggataatagattggcattagactatttgttggctgaacaatgacaggtatatgctgtgattaataaaacctgctgtacctatgtaaacaactcaggtcaagtagaggaagataccgacaaaatatatgaacaaggctgggcacagtggctcacgtccagtgcttttggaggccaaggagggtgaatcacttgaggtcaggagttggagaccagcctggccaacatggtgaaaccccatctctaggaaaaatacaaaaattagccaggcatggaggcacatgtctgtaatcccagctactccggaggctgagggaggagaattgtgtgaacctgggaggcagaggctgcagtaggccaagattatgccactgcattccagcctgggagacagagtgggaccctgtctccaaaaaaaaaaagaaaaagaaaaaaaaaaaagggccaggcatgttggctcacgcctgtaatcccagcactttgggaggctgaggcgggtggatcacaaggtcaagagatcgaaatcatcctggccaacatggtgaaaccctgcctctactaaaaatacaaaaattagctgggtgtggtggtgcacacctgtagtctcagctactcaggaggctgaggcaggagaatcgcttgaagccaggaggtagaggttgcagtgagccaagattgcgccattgtactccagcctggcaacagagcaagactgcgtctcaaaaaaaaaaaaaaaaaaaaaaaaaaaaaagaacaagccaagtggctacatggtgttcacaaccccaatacccagactactatgcggaattccataaggggtttctaccggcagtgacttggtttttacctaggacctttaatagctctcttgttactattgatctttgtttggcctttacttatttaacctcttagtaaagttcgtgtcttctagattataacaattccatgtggaaatgatgcttgcactaggtttctgacccatcctgtcttctagcctggaaaataaagatctcctgcctttggggtccttagatcaggcaaccagagattttcactcctccaacaccaggcagagcctatgcccataagatcagcaggaagcagttgtagagggtggacctctgcccttctaccactttttaagattaaggaggagtctgacgcctgtcatcccagcactttgggaggccgaagcaggcggatcacctgaggtcaggagttggagagtagcctggccaacatggtgaagccccgtctctactcaaagtacaaaaaattatccatgcagtagtggcgtgcgcctttaatcccagctactcaggaggctgaggcagaggttgcagtgagccaacatggtgccactgcactccagcctgggtgagagagcaagactctgtccaaaaaaaaaaaaaaaaggtctggtgcgatggctcacgcctgtaatcccagcactttgggaggccgagacgggtggatcacgaggtcaggagatacagaccatcctggctaacacggtaaaaccccatctctactaaaaatacaaaaaaaattagccaggcatggtggtgggcgcctgtagtcccagctacttgggaggctgaggcaggacaaaggcatgaacctgggaggcggagcttgcagtgagctgagatcacgccactgcactccagcctgggcgacagagcgagactcgggctcaaaacaaaacaaaacaaaacaaagattgaagaggactctacagtctctccgggaaggaataaggttagagatcagcaggacttgttttctgagcaccagtcacaagaccttgctgaacaaaacatgatctgatcaaaagaggatgcaggaaagacattggccaaaactagctaaaaccaacacggtgaccaaagcaacctctagatgccctcattgttcattgtgcactaattataatgccttcgcatgctgaaagacactcccgccagcaccgtgacagtttacaaatactgtggccactcccagaagctaccttatacagtttaaaaagggtagaggcccagtgtggtgtttcacgcctgtaatcccagcactttgggaggcgggtggatcacgaggtcaggagatcgagaccatcctggctaacgtggtgaaaccccgtctctacgaaaaatacaaaaattagccgggcgtggtggcaggcacctgtagtcccagttacttaggaggctgaggcaggagaatcgcttgaacccgggaggcggaggtttccgtgagccgagatggcgccactgcactccagcctgggagacagagcaagactctgtctcaaattaaaaaaaaaaaaaaaaaagccaggctggctcacgcctgtaatcccagcactttgggaggccgaggtgggacagatcacctgaggtcaccctgaccaacatggtgaaactccgtctctactaaaatacaaaattagccaggcttggtggctcatcgcctgtgatcccagctactcgggaggctgaggcaggagaatcacttgaacccgggaggcggaggtttccatgagccaagatcatgccactgtactccagcctgggcaacaagagcgaaactccatctcaaaagaaagaaagaaagaatgaatgaatgaataaataaataaaataaaaattaaaaaaaggtagaaacccttgcttccagaaactccccactccttttgcagaaaactcgtgaatagcctgtcctttatttagcatataatgaaggaatagacataaatatagctggccagcaatccacgagggctgccgctactgctctacggagcagccattttcctgcactgttgctctaataaacttgtgtttgctttgctctgtcttgtttgctcacccttgaattcttttctctgcaaagccaagagctctcccagtctgagccccaatcatcaaagatgattttgagggcttcagtatttaaaggggaaaagcaggctggaggggaaggagggaggggatggtcacattattaaatccgtatgttggaagagaaaaggagcagggaggggaatagtgacatattcatctagtgcttctacatcggcattttacacaagataaggtgaatgcagagtgtagatatttaaccttttatccgtggctctctgcttaggaacaaaaggagaagcagcttcttgcctgactcagctttcagcttaatttttttcttttggcagagtgaattgggattccaagattttatttgcctttcccatcatgcgattggataccacaaagcagtgaagaacagtgagtgcccatgtacttgacaatgaaggggaatcttccagacatacatgaagcgaaggaaggcaggcaaaagagtgtgcttgtgtgatactgcctatttggggctctagaagaggcaaaactaatctatgggagtttgaggataatgttcaggataatggtttacttttggcaagtgttgtctgagaagaggcacttgggagccttctgggggctggaaatgttctgtatcttgagctaggtggtgggtacacaggcatatggcttgtcaaaaataattgagttagccgggcacagtagctcatgcctgtaatcctagcattttgggaggccaaggtgggtggatcacctgaggtcaggagtttaagaccagcctggccaacatggtgaaacccctgtctctactaaaaaaaatacataagattagctgagcatggtggtgggcacccgtaatcccagctactcgggagtctgaggcaggagaatcgcttgaacacgggaggcagagtttgcagagagccaagatcacgcaactgcactctagcctggaggacagagcaagattccatcttaaaaaaaaaaaaaaagaaggccaggagtggtggctcacacctgtaatcccagcactttgggaggccaaggtaggtggatcaccagaggttgggagttagagaccagcctgaccaacatggagaaaccctgtctctactaaaaatacaaaattagccgggcatggtggcacatgcctgtaatcccagctactcgggaggctgaggtaggagaatcgcttgaacccgggaggcagagtttgcggtgagccaagatcgcgcaattgcactccagcctgggtgacgagcgaaactccatctcaaaagaaaaaaaaaaagaaataaagacataaaagatacttggggctgggcacggtggctcatggctttaattccagcactttgggaagctgaggtggctagatcacttgaggtcaggagttcaagaccagcctggccagcatggtgaaaccctactaaaagtataaaaattagccaggaatgatggcaggcgctaatcccagctactcaggaggctgaggcaggagaatcgcttgaacctgggaagtgaaggttgcagtgaactatgattgcgccactgcactccagcctaagcgacaagagcgaaactctgtctcaaaaaaaaaaaaaaaaaaagttgagtcatgttgtgaatgtatttaacaccactgagccgtacacttaaaaatggtgaagatgttagattttatgttatatctattttaccaccatacaaaaaaattgagttataccttaaggtttgtggactttattacatgtcagttgcacttcaactgaaacatttagcacgatcgttgcccctggctcctgagtaatttttttcatttttcagacatgaggtctcgctctgtcgcccaggctggagtgcagtggcacaatcatagctcactgcagcctcgaactcctgggctcaagtgatattcccacatcagcctcccaagtagctgggatgtcaggcataataagctactgcgcccgtccccccaagtcattgcaaatgttctttgaaaataccaccttcaggccaggcgcagttgctcacgcctttaatcccagcactttgggaggccaaggcaggcagataacttgaggtcaggagttcaagaccagcctggccaacacggtgaaatcctgtctctactaaaaatacaaaaatgggctgggcatggtggtgcatgcctgtagtcccagctattcaggaggctgaagcaggagaattgcttgaacccgggaggtggaggttgcagtgagccgagattgcacccgcagcctggatgacaaagcaagactccatctgaaaaaaaaaaaaaaaaaagaaaataccaccttcagtggccacatattttcccatccacggatgtgtcctggtaccttcattcactctcaaatctttccccagaattgtgagaaccacagccccatgtcacagccccaaggttgcagacaaggtcccgacccacgttaagacgcaaaataatttattggaaggtttttcttagacccctgggaaggctaggaaacctggcttggaaagaaggaggagctcaaggaggcaggaagctgccccacagcctgggttaccccaggaataggctggtctaggggccgctgtaaccactgctgacactgtggatgtcaccatcagggacagtgccactctgggacgctgcagccatagccactgggaagaggtcccagtgggcccggattctttgtggaggaatctataggcctgagctctagaggctgggaaatggaggggcaagtctctggtccccatgctcaacaagaccccctcagtggggaattcctcattgcagaaggggcaccagatgcagggcagctaaacaagcagccagggattcctaccccgagaaatgtcctctaagacaataacagccagtatttgttgagctctcactgggtgccaggcccctgtgccaaacttcctacatggattatcacaaagaatactcacattagccctgtggggtgggggttattattatcttgattttgcagacaaggaggcaggcacagagcaatttggcaacctgcccaggaccacacgcatgaggagcaggaggcggcattgcattgggggcacctgtgtgccaggtcagtgcagggcactttgcagtcctcttagggctgagggccttggacactcagcaccattttccctgctctgtggctgcagggggctgcaggggctggaagcctgacagccacgtttccttgaagcccctgcagcagggttctgggttacagcctgtcagtcacgggcatttgcctgacacctggaaggctgtggggaggtgcagtggcaggcaggggtgggctttgccagatgtgacactttgccagtgacttctgggggtctcctggggctgaccagcccccctccgagtggtgcatgctcctgcaattcctccagtcctagtttcttttctttctttttcttaagacagggtctctttctgtcacccaggctggagtgcagtggtgcaatcatggctcattgcagccttgacctcccaggctcaagcagtcctcctgccccagcctcttgagtagctgggaccacaggcgtgcaccaccatgccaggctacaaatcctaacttctggaccaggtgtggctgcccctcagctctttggaaggttttgcaagcctcaaattccccgtgttcagtcctttcctgcttgaaatgccattttcccaactgaaccttgatgaggcagaggtgttaaggcaaagcagctgggcctataggcctgagctctagaggctggggaatggaggaacaaggctctggtccccgcgctc

SEQ ID NO: 3 - DNA, 191582 bp, Homo sapiens
aattctctcacagagttgccaggagagctggaggagagaatgcagatgaggtctctgggacagcacctagcccagggtgcagctcagcaagtggcagatgtctgctactgagagctaagagctcactgtaagcattggactcaaccttctattcaactccctccagaaagcactgtcaccacagcactgtcaacaaattaccatgctgcaataagaacagggcctccacttccagcagcaggacacacaggacttattaaggtagctcactcagctttcaaaactgccattaatttggcaacaaggaaaatctgaagctaacatgctcagatatgaacaaatctcagtattccaaattccttccccagtagagaaagagaaacagactacctactatccctagtggcccggctattctcacatgccctttgaaagatggctacaggaatcatgaaactaaatcacctgatcccaagcagtgaagagtaaacctaagccaggcgtggtggctcatgcctgtaatcccagcactttgggaggccaaggcgggaggactgcttgagcccaggagtttgagaccagcctgggcaacacagggagaccccgtctctacaaaaaaataaacaaaattagtcaaacatggtggcacgtgcctgtagtcccagctactcgggaggctgaggtgagaggatcacttgagcctgggaggttgaagctgcagtgagctgagatcaggccacttatacttcactatactgggcaatagagtgagaccctatcttaaaaaaaaaaaaaaaaaaaagcaaatctagaaataacatacggtattaggttgaatcaaatgaaactgccattcttgttggtcaaaaacagtcaaacaccggcggcgtcatatggttcaaacctagtatataacagaattttaaaaaaatcttcactatggctgggtgcagtggttcacacctgtaatcctggtgacttaggaggctgagacaggagaagagcttgaagccaggagagttcaagaccagccagggtaacacagcaagacccatctctacaaaaaaaaatttttaataagctgggtgtgctggtgtgcacctgtactcccagctacctgaaaggctaaggcagaaagatcacttgagtccaggagttcgaggctgcagtgagctatgatcatgctattgcactccagcctgggcaagagagtgagactcccatctcaaaaaatttaatatataataaacaatacatacaagagcatagatagaacttaagaactagaacaaaatcagttccacagatactataatctatgtgtcctgatgcctgccctttttgtccccaagatatttttattattctgaattgtgttaacacaattcccttaccttttccaaaaagagaacttttactacatgtgcacatattcttaaacaatttttaaaatttatcaggctttatagaatggtatgatactacttacagtctcctgcagtttgatcattcaacattatgtttgtaagattcacctatattgccacttataaccatatgaggttctattatttacaaaattctttcaaaaacttatcatctcggccgggcgcggtggttcacacctgtaatcccagcactttgggaggccaaggcgggtggatcacctgaggtcgggagttcgagaccagcctagccaacatggagaaaccctgtctctactaaaacatagccaggtgccagggagcaaactaaaggaaaaagccagcgcagtgaaggcaccatccactcatctaaacacatcctcagcactggcagctagcacaacactagcacagacggacagtgccactgtcaactagaagaggatacctcttctggggagacagagcacaactagcctctctgtttctgggctgtgggattagacaaagaaacccctgcccctggtccccagccagacgcagcagagcacccctctgccaggcatcctagtgctgggctccatctgcacagatgtacagggcagccctggacatgcccaggcctctcatggataagatatctcatgcagcagggcaggaaaagctagcagcttatgattctagtcctcaaggaacttacgctcaatgaaaatggggaatatctgatctatctaggaagagagtgcaggctgacaaagacgagcattgccaatcaaagaagtattgccagggctcagagccacacttcaacacttagggttcatgagaacctctgggcatgaagcattgtgcagggcatggagtcaggggtgggtgggtagaggaacaggacctatgctttagatatgtacatgtaactctaagacatggtatactggtaaatgttacagcaacattaaaactgccttgggacaataagaaagggaaaataatcctgactgcttagaaataagactgcaaggtcttggagcaaggccttgaaatctaagaatttgaccagcatatggggacaggaagatgggaggtagggagactcagtaggaatgcacaaaacaaaccaaggaagggtgatgggaaagaacaggcatggcccccacagggctacagtcagagactgagcagggccaaggtgttctagcagcaagttctataaagcagggccctagaagttgagaggaacacggtgaaaagggcaaagtctcagggtacacagcctcaggggacaataaaatggtaagtttcatatatatttcaaatttggatgaatacacctttacagaaaagaaagaggttcggatgtaagtacaaaataaatgttgcttttcatgatttctgatacagtttaatgacataggtgaggttaacagtgaaaacacagcattgcaggttcttgcagcaatgagacaaagaagccatcttctgtctgtggcatatgtcaactaagcgtttatgaacaaatcttaccgggatgaactgctccagtcggccttggggaaagatgccatagagttttggcccaagtgacctctctgcgagaatggcaaacataacgctctccagaaccatggcctcagccccctaaaacagatggcaacaaatcaggtgtttactgagtgtttgctaagcgccaggcatcagaagcactctcacaggagtgtttcatctgatcctcatgagtattctttcacgtgggcactactgttatcatcatccccattttaaatatgaagaaacagaggttccaaagtcacacatcgtgtcatttgcaggattcatgcttgcaagcactatgctatattgataagatttaaaatatgagtttaatttaggtcactagatccaaaaatagaaaaatatccatcagtgcttttattgcttctatttatttcgcaacctatataggagtctcacccttggtatctcaccaaaggccacaacaccatccattctggtaagggttgatttgcttttggttgagtgtgtctagttaaagcaaaggatccaaaggaccttctgcctactaaattgggctcatgggtccaacaagcttgaaaattactgatttaggtccagggtctacggctttctagtccaaagagcaccctagcatggagcatcctagattgctattttcagttggcacacccgaccttttcctgttattgaatgtttgttgtcttgctgaaatctctatgatgctgtctgttctatcttcgtcctaataattaacgtgggatctatcatcattttgccttcaaaatccatgctttgatctcaaagcaaattcagtccttggtctttcccccttaaacagcacattacagcataatggtttccatctgttggagtgaaggagtcacgcttacccagaggtccacctgaatctcttaaagagcttttacaggccaggcggtggctcatgcctgtaatcccaacactttgggaggctgaggtgggaggatcacttgaggccaggagttagagaccagcctgggcaacatagtgagatgccccaccaccaccgaagtctctttttaaaaaaaagagcttttgcaaagagattcctaggtcttactccaagtattaaaagagaggcaccagcagggctgttttgaaaaagctttcagatgattctaattcaccccctgtgaagcaatgtgctgtggaggaacatgatcccagagaaacctctaaaacacattcacgttaccaaaaactgagaaaccaagaggacaaacttattaggaaatgatacagtactatagtaagaagaaaacaaaaaagaaaagctacttccaaaggatatcagaccacattaaagcaaaaagtattttggtcacttttacattttgtgggggtaaatggatttgccggtaatccccccacaattatcgtctacaaccatcattcgtataatcctcacaattatggcctgtgatcttgtgaggctcaatctttcctaatttgtggttttgtgtatatgacaataaactgataacatctatctatcaagctaatgaattttagggtgggatttgatatcagacaggttttatttcttaaaaccttagagaatgaaaacaaagatctagtatctctatttagttgtcaaaaggtttccaagaactttttagtcctatggtagtgttgtccagagatgcagtccccatcttactccaagcccaacatcacagaaagtatccggggcatttaagcaagggtctgcaaagcctcctccaagtctctgcttagacattatgctcccctgctccccagggggcagcacggtcctggtgctctgaagactgtggtccccaccaccaccctcatgctgtgtaaaacacaaaagtaaacaggggctgggcatggcaggacaagggggtgctggactcggaagttcagcattttgcacatcatgtccactgggaaggattctcggaggtgactttatttacgtgtggcatcgtcaacacatgtcaccagcactagccagaatcctctccagagctgagtcaacccagaaaggacatagagaagagggaaagagatgtaagaactttccaattctctttagcactgccctaaacattgtaaacaaaaacacacttattcttacgtaatactgtagttcaatatttattcacagtaggaagaaagggggagatggtgtatggagagaaggatttggagaggaagaaaatgaggccgggtgcggtggctcacgcctgtaatcccagcatttcgggaggctgaggagggcagatcacctgaggtcaggagtttgagaccagcgtggccaacagggtgaaaccctgtctctaccaaaaaagtataaaaactatctgggcatggtggcgggcacctgtaatcccagctactcaggaggctgaggcaggagaatcgcctgaacatgggaggcagaggttgcagtgagccgagatcacaccactgcactccagcctgggtgacagagcaagactctgtctcaaaagaaaagaaaatgaaagagaacacccaggcacaagcaagaaaaatgacaggttaaggacagcagagaatcctagaataagtgtaccaactactggtggtcttcttgtcatcactatgtctccaggcaccttcctgattgctcctgaaagtgagcatggtaaaaagggggctggacagacatggctgggttctctcctgtaccacgcactggtttagccacagctggtgacagtggagggaaaattggtcctactttttcagatatctcaacttggaacaatttacttgggcttcagaaataaagactcattaatacatttgcctaaaacacacttactcaatgtctactatgtcctggcactgtgctaagcgccagggaaccaacaaagaacaagatacataaggcccctgcccacaacggggcttacatgacagagaaggagggatggggagagagagagaaatggacagtaagcaagtacacgcagctatggactgggctcactgccatgagggaaacaagggtgactggtgtggtggtgtgggtatttctaaggaggccacactgaactgacctgagatctgaggtgtgaaaagccacagcagccccatgggagcacagggccatgaggaaggaacaagtgtgacgccttcaaggaactgagaggcctgtctcactggaacaggacaatcaaggaaaaggaagagcagagcatgagattgccgggtggactggggcttacagataccaattcacaagtcctcaacatgttgttgatgtttacagctcacaaactgggttcgatcccctggggacagaagaggaggaaccagcacaggccttaaaatgccctttcttatgtgactgtcaccacagtaagaaagctttctacagggcaccctcgcatacacccccaaaacaaacactatccccacagcaatactcactctcacaactgggcaacacttattaatattttctactctatttcattttaaaaagcaatcaacatgctaacatttcatgccccactagaggttcacaagccacaacttgaaaaactggtttaagttcaggcagcaaaaagaggggccagggcagaaggcaaggtgaggcaggcgccactgccaggaaggagagtggtattccctaatggtgctgctaagtggccattagatttggcaatatggaacctgttggtgacaaaaaaaagaacagcttcagagtgatgggtggacagatgtcagattggagcatgtgaagagtgaacagaaacgggagagagaagtggttgagaatggaacaaggggtttaaactgacttttcactttatctatgaagtttcatttatttaaaacccaggaagaagagtattgatgttatgaacttcttgagaagacataacagcatttctgtggtatttcagccaaaaatgcataacctcaattgtgagaaaacactagacaagctgaaattgaggagacatttccaaaataacggatcagtactcttcacaagtataaagattacaaataacaaaagaattgttacaggctgaaaaagactaaagagaaatagccaatgcaatcttgagatctagctaaatctcgagacagaacaaaagaaaatatgcataggaaaacttctgaaattcaattcaggtcatagttcagttattattttttttttggagatattattattattattttttttttggagatggatagcccaggctggagtgcagtggcaagatctcggctcactgaagcctccgcctcctgggttcatgcgattctcctgcctcagcctcccgagtagctaggactataggcattcactaccaagcccagcttatttttgtatttttagtaaaaacagggtttcaccctgttggccaagctggtctcaaacttgtgaccccaagtgatcagctcacctcagcctcccaaagtgctgggattacagacgtttagttatcactattgcatcaacgttaatgtcctggttttgaccattgcactgtggttatgtgagatgttcgcattagggaagctgggtgaggggtgcatgggaaatctctgtactattttttttttcttttgagtcggagtttcgcactgtcgcccaggctggagtgcactggcacgatctcggctcactgcaagctctgcctcctaggttcacgccattctcctgcctcagcctcccaagtagctaggactacaggcgcccgccaccacgcctggctaattttttttgtatttttagtagagacggggtttcaccatgttagccaggatggtctcgatctcctgacctcgtgatccacccaccttggcctcccaaagtgctaggattacggcgtgagccaccatgcccggcctctctgtactattcttgaaattttttctgtaagtctaaaattggtatgaaataaaaggttaaaaataaattcatataaaattcacataaaaaagactgaaatcggccgggcgatttcatggcgagtttgaggggcatgtgagacatccgaggagagactgctagccaatggcattagttccaagtcgaggtcagggctggaggaagaatgtagcggccctttggcctatagatcaggtgaccgagggagacaggacaacatgagaagagggcctatggtcaaatcatggggcgccctagcatgtagacagccagatctgtactttgtgtctctgtgtcatggctgccctcaggagaggaaacatttcaaaagggtgggggtcatgtcaaatgctactgagaagtcaaaataaaatgagaactgaaaagtactttggatttagcatcacgcaggtcctggtgatccaccattttcagctaacaggatgtccaaaggcctctgcacaaagggcttggaatggttcacaacagattgtcaatcacttcccacccaaggacttcccagtcactgtcactccagagagcacaagttctagatcctctagcagggcacccagagcaagacacatgtaaaacaagccgctgaaaagtgtggaaaaaatatcatcactttcattccttttttatctcaaccgttttaatgtctatttcttgatttttttcttttttttttgcatttggtggggacgactcctgtcgcccaggctggagtgcagtggcacaatctcggtctactgcaacctccgcctcccaggttcaagtaattctcctgcctcagcctcccaagtagctggaattacaggtgcccaccactatgcctggctaatttttctattttcagtagagacggggtttcaccttgttggccaggctggtctcaaactcctgacctcatgatccacctgcctcagcctcccaaaatgctgggattacaggtgtgagccaccgcattcagcctatttcttgaccattttaataatcaatatacaattggtaaaagtgatgtggcgatgtgtgtatctacatcttagacccacgtatgttgggcatgtgtgcacatgcacccttctctgtgagcctgcacataatggcagagatgctcaaaaggtgcttacgctggggcatgcagaccaacaccccagacccctgcctctgaggctccatcggtcagtgctcttggcctcaagccatctgcacatgtgtgtttcagagagtggggtcacattctctaagtctaggaagaagcttttccaacttgggtatcatccataggaaaaaacattgctgttagcccatggaaaatgggtggccaccaaaaccactgggcagtgacccgcttcctgatgggaagtgtgggaacgaccagaaagggggtgagagaggcatcacagcagcggcagccagggcctcctcatcaggtaccacacacgaatgctcccctggctgccatctgccaacatccgaatgctgtttcgattgccataaagacaccaaacttccacagtctacactctcaggaggaatgaggaatacccaccgctcactcagtctccgtaaggtggcttctgatagatataccaagagcccctcctcgtagaaagatagatcaggattttccaagggtagataagaggcactgccaagccctggagtagcgaagggtggctaacactagttcacatctcacacagatgcagaaagactgaattacttacttgaaattcattttctttctgagcttgttcggatccctctttattacaggacctctatgaatgagaaaaaggaaacacttctggtgagatggggaacactaaacagacactaactttgcaaccaccagaacagtcagggtttacaaaacatcacaggtctttaaggaaggtttctcagcccaccgatgtgacgggcagcatctaatgcaccagcagcctccagcactagtaccaacaccttagaaagtgcttcattgctttacgagaaaagggatgtgccggtgagacccgatagctgcacgtctcacagccgccccatgtacctttcacaatttcattgttagaggaaagtcaatagagtgcactcttccaatcaggccttctaaagacaagcggtcaggctgagtctctcaccaatttagctacgtggttctctcaagtcaacctgcaagaacagggagtgtaaacatgcctgtggacagctgtggtcagcacagaacttggacagagaagaaagcgctgtgcaggcaggaaacctggcacaaaatctgtgcagacatgccctgccgactcgccactttcccagagtaacccctctagttcagccggtcaccagctcaagctgaactgttcctctaccataaagaggactgtgtgtatttaataaagtctctaaaattatttcatatattaatatattaagaaatacttatatcactttcctcaatgaaattgcaaatttatgataaccaggattctagcaataacaacacactagatcattaactaccataaacaacccttgggctacattctttctcatggtacagatcatatattttaagagcaaccccccaccccaaatgctttaaaatccttcgtactatctttaataagggaatggggaaaagtaaagtcagaaacttgtgtcacgtcaaacttttatactcaaatactgcctctaaaaatgttacttgttaaattaaactaagtctgcttaagccagacacaaaaggaatcccagaaaggaaacctctttaaaaaaatttaaggtaacagattcttgaacaccccatgaaaaacatacctttccattccacagctttatcaaaaatacctgtaccaagggtggaaagtgtggacaggaaaaaaaatgccacgttaagcaacaccagctactctagcaccaatcaaaaacctagtgatttaaagcaaccactcatccatcacacactgaaataacattacagacgttttaatgcatgttttgtataaacagtacatgtaatataaaagtaaacaaaataagtatccatgttcataaatctatttgcaaaaggctcttaacgtttgcactgatacatattcaatactatatttagcatacagttaagtacatttggtacaaagtacagaaagtacaaatggggatttatgatattttcatttgtgtaatctgcagttctctgatgaaaagatgttacaggttaaatcccgttacaatgaaagctataaaaatcaaaatactacaaaaatgctttcagatctttgcagatggtttgatgtgcgatgtggtaggcgctggaaagcttcccttcaccctaattccaaacactctcgtggccgcatcgttccttagactctgctttgcgggtcgcctcttccaagcagtctgtaaattcctaatgaatagggactgcgtcttttattgatgttagtcttctcccagagcaccaagcaaatctcgatgcccactacactttttaggctgcatgaataaatgaacactccggagtggtatagcacgaggcaagtgagcccaacgagctgcctggtgccacgcagccaaccagtgatagcaaattcccatccagggtcttggtaacaaggaagctggctgtggggttaattagaaatgccccttcaaaagtccttgtgtttttttctccaaagaaacttaagaacaaaaaagttctataatctgatatattacatattaatactttgcagtataagctttaagacaaataagttagatactcttctgaaattgttgtaacgggatttgacctgtacacaattctaaatgactatggttattcctatgctgttgttactctaactgtatcttcttagggagatacagttaatgggttatttagccttcagaagtccctttcccttatctaatggcgctcgcaaaagcaagttacttcatccaaagttaaaaattggctgaggccccaaagtctttcctttttttaaacatattggcactataagtggtagtaaatccatgataatctcccctgcccactccctcactccacccccagatgaattcatcacttataccataagagcaccattatgaaggcaagatggacttctgcaatatccagccctctgttctgtttcctcagtacagaatgttcaggctccctaagtcctgtaaataagaagtgtaagacgaggaaatctcaaaccaagtgtatattcatggaaaggtaagagaataactttttcgtccaggaagacaggaagttaaatatattttggggccggcgggggtggcccatgcctgtaatcccagcactttgggaggctgaggcaggtggatcatctcaggtcaggagcttgagatcagcctggccaacatggtgaaactccaactctactaaaaatacaaaaaaattagccgggcatagtggcgcatgcctgtaatcccagctactcaggaggctgaggcaggagaatcgcttgaatccgggaagaagaggttgtagtgagccaagatcacgccactgcactccagcctgggtgacaagagcaaaactctgactcaaaaaaaaaaaaaaatacatatatacgtatatatacacatatatatacgtatatgtgtatatacatgtgtatatatatacacatatacgtatatatatgtgtatatatatatacacatatatacgtatatgtgtatatatatacacacatatacgtatatatgtgtatatatatatacacatatatatacgtatatatatgtgtgtatatatatataggaatccgtgggattttacttcagtgacataaattcatttgaagtagatattaaaatacattgtataaatatttagtatgacatccaacttttctctaacaagttaataaaaattatcctctataagttataaaacaaaactaagctttttacatttattagaaatttgaacactggttatttaatattaagtaattattaaatttttttaatgtgaacattactgtggtcatttttaaaaaatcatcttatatagatacagactgaaatatttacagaataatataacatctggaatttgcttcaaaataaccctggtggagtaaatgagggaaaagatggaagaagactggctgtgaggggaagatgaggaatggacactggggttcattatactcttctactttagggtatatctgaaattccccataataaaaacttttaaaaaataaacattgaaatttcaagacctaagaaatcagaatgtctcaattatgcctaagacacccaactccataaatacactgaaaaccactgaattctacacttaaaaggcacacaataatgaaaaatatattgccactggcttcctcccaccttctttctttccttcctattttgggcttagttttcaagagaatcttaagttagagtcatatattcattagcctgtgatgtaggaaacaaatgaggctacagtgacagcattaataaaggaggcatacttactattttaaagttagcttttaagaggtgaaactttaaaaaaaaaatttggagactgggtctcgctctgtctctcaggttggagtgcagtggcaggaatagggctcactgcagcctcaacctccccaggtcgagcaatcctcctgtattagcctcccaagtagcaggaccacaggcatgtgccaccatacctagcctttttttttttcttgtagagacaagatctcactatgttacccaggctgctcttgaattcctgagctcaagtgatcctcctgccacagtctcccaaagggctgagattacaggcatgagccaccatgaccagcctgaaaaagattttttgattggccaagaacttttaaatttaaaaactaaattcctgaaagtctgaattatattagctatggagtaaaatgagaaaatagaggactttcatttttactttatttctatactttaaaaagtgcttaaaagcgtgtattatttttataataaatacatttgatacaaggtttcaaatgttacttttctaacaaaattgcaatttaaggctttggggtttttttgtttgttttgttttttgtttttgagacagcgtctcactctgtcacccaggctagagtgcagtggtgcaatctcagctcactgcaacctccacctcctgggttcaagcgattctcccacctcagcctccggaatagttgggattacaggtgtgtgccaccacgcccggctatttaggctttgtattttaaatgagactatgaaaagcagtaaatattcatattacagagcacaggttttcaaaatgttctacttcatgctttaaaaataaaatgggccaggcacggtggctcacgcctgtaatcccaacactttgggaggccgaggcaggcggatcacgaggtcaagagatcgacaccatccttgccaacatggtgaaaccccttctctactaaaaatacaaaaattagctgggtgtggtgatgtgcgcctgtaagtctcagctactcgggaagctgaggcaggagaatcacttgaacccaggaggccgaggttgcagtgagccaagatcgcgccactgcaccccagcctggcgacagcgagactctgtctcataaaataaaaatacaataaaaaaaatcaataagtggtaagacaactccaggaccaaggaggaagagatgtccctttattgtattttgtgttatatgattttaggattcaaaaacctactttaagttacctaatgttccacaatatagcaggtatatttcttttaacctatttaagccatcagacagaataaacttatttggccagtacttaatgaaagacttctctaatactgagggaagtaggtttatgactaaatgaataaagccccatttgggagatgaaaacaaagcagcacctcagttttccctagagtctgtgtatagtaagaatgggtgaaagcggcataaagaaagtgtcattaagtcacatatagttatcatttaaatgtcatttggctgggcgtggtggctcacgcctgtaatcccaacactttgggaggccaagatgggcggatcacgaggtcaggggattgagaccatcctggctgacacagtgaaacaccgtctctactaaaaatacaaaaaattgcctggcgcggtggcgggcgcctgttgtcccagctactcgggaggctgaggcaggagaatggcgtgaacccgggaggcggagcttgcagtgagcagagatcgtgccacttcactccagcctgggcgacagagcgagactccgtctcaaaaaaaaaaaatgtcatttaaaacatctttaacacccaaaacatttatcttcaaagtatctttaaacgtccaatactacatgagctgctgtgagacagattttaaaaagtgatgaatcagctacaaagaatagcatgtcatcaatagcaaaataaattggaaatgctatttaagaaacgaaatcattatcaattatggataatataatatgagccaggcatggtggctcacattggtaaccttagcactttgggaggttgaggggggcggatcatttgaggtcaggagttcaaaaccatcctggccaacatggtgaaacccaatctctactaaaaatacaaaaaaattagccgggtctggtggcaagtgcctgtaatctcagctacttggaaggctgaggcgggagaatcgcttgaacctgggaggcagagattgtagtgagccaagatcacaccactgcactccagcctgggcaatagagtgagacttcatctcacacacacacacaaaaaaatcataatatagaatagaaataggtactatgttaaatataatggtggctgctgaactaaaatgatatataaataagagtacaggttttttatagaaaaaaaattgtgccatccattttttaatagaaaaaaagaaaaatacacacaaaaaaagaaaattaagaaacatggatgacattctcttcttcctaccaccccttcctcaccaaaaaataactaaatggatcattcagcttactgtctcttttaaaggctttacataaaacggtagattgattgtgaccttttaaaaatgctttgagacctataaataaataagtaagaataatcctgtctgggtgcagtggctcacgcctgtaatcccagcacgttgggaggccgaggtgggtggatcacctgaggttgggaatttgagaccagcctgaccaacatggtgaaaccctgtctctacttaaaatacaaaaattagtcaggtatagtggcacatgcctgtaatcccagctactcaggggactgaggcataagaatcgcttgaacctgagaggcagaggttgccgcgagctaagatcacgccattgcactctagcttgggcgacagtgggaggctgtctcaaaaaaaaaaaaaaaaaaaaaaaaaaaattcctactgttagctagactcagtttcctcagtttctaggatatgtaaattttggtctcggaaaataatccatctttctactaatctggtattatcttcctgagctgagtactgaaacaactcccaggtcatcgtattcaccctgagaataggaggatatggtgcatcattcggattcaattcagtagctgtgatgcccatttggtcttggagtggcatgaacttctttactgtgtagcctgtggcttcggagacccttaatacccaccctggttatctcaccacactcaaccctctaggagagaaataatttttaatacaggggtggcatctgttataatccctggcctgccaagtccctgttgatgatgaagctatgttccatctcaggagaggtggggcaggaaaaagcatgagaaccatgactctatagaatgtgttcaattctatagaattgaaagagttatgtgactctttcaattaacattttgcagtatattttcttggcaatatgttttcttctcagagttatcatggaccctaaccttacttcttcctgatttctatgaaaaaaaatgaaatcatcccgtatttcttgcttttatggtttcttacagcattctttctcgaactcctgacctcagtgatccaactcgcctcagcctcccaaagtgctgggattacaggtgtgagccactatgcccggccacttttagcactttctgaaaacattttacagaacacattaaaatgtgagatctcaatgcaatgatttaaagtatagcttatgtgattatttaataagcacatatgaattacaagaatttaaacagataagtgatttctaacattttatggtagtctctagagtgtcttcaattatcccaaggaccagcctaaaacaccttgatctttttggacattaataatttcaaaattggatgacttgatgaatatccgtaggaaactagaacttctaaaacactttaggcaacacaagccagcagaaagacaggtgagtggaagcccaggttttaaaaaggcctatttcaggaccttctcaaaatctatgtctgatctagggcaacctgctgacccaacactcctcagacttccaagactaaataaaataccctccctctaagtatcccaaaggttgacttgcaagcaacacttttacgggaagtgtgccttcactacatcaagtcagcactgcagagctccctaaggtctcaggtacccagctaagacatatgaaagtatactgactggtaaggacaaagaagaaggtttgtttctaattctgaccaaaatatcaaaatatatatggtgtctccttaatgctggaagtgatatgaaggaagaacttgattacttcaattaagttatcaagttgaggcccataaatttctaaaattcctaaatgtttgtcattttctactgaggaaacagaagaaaggaatctgatttgctttggacaaaaaaaataagtgatatatttattacacaacattctgaaatcttaatcactgtacctctttaagcacagcacaaactgtagctggtgctacttaacaagcattacaactttcttttttaaaagcaattcttgaatccaagaactaaaagaaagaaattaaagctgtagagaatgctccaacttcagaggtctcatactataccgtgaatcgtgtctgtcacctggaaaccagagtgctccaggcacgatcgcatggacaagcctgcagcagagaacacatgcacatacagctaaagtggtacattacccccaacgcccttcactccacccaacataaagacattccttcccaaagaggggtgggctgcggtcaaaccatcgttccatggaccagaaatccgcattggcttcatgctataaatcccaaacatttaataccagcaagacaaagacactctgaatatgtaaaaattagacatagtagtctgtggtttatttggttatcaaaagaaggcaccaaagcaggtatggaaggactattggtagtaatttggcaactatcttgggagagtatcagctaaagaaatattaggttagaccaaatgggaacgcacaacactagaaaaatgttttacttctgagaaggaagttttgactgccttaggaacacagaattaaaccatactcaaaagtataagggaatttttttaaagcagagtgaacagaacaacttaaattcctaatgatcctaacacaatgaggaaaacagtggcaattcatagaattcagttaccagggacatgactccttcaaggagtaccagcaatgctggtctttgcatggtgtgaccttagtaacataaagaaataggttttagcagctgatttctcagtagctggtagtttaatattaactatttatgagttattccatattttattgtggcttaatttttaattaaactggggctaagagaaaatagggaggaagacatttgttttctagatttaaaaaggacagtgtctcaaatttgactcttttaagttgctaatacatatctgcgttgtgccttgatgcctttattatggttagtactcaaacaagcactaatattagccttctattactcaaaaaacaaacaaaaacaattttccagacaacattcaagagagatctttgatgtgtattataaacgttcatgcctgtgagaccgctcataacggtgaggccaaatctctccactcatgcacagaaggaagtggcttaacacagagtcactgttctgacagaggaagggacaaagcaatcctctgagacttccgccaactggcacaggttacattgaatgaacaatacgtactgacatttgtgtcttccacaattcatgataaataagcaaactggttatttgtaatcagccaaacttgcttctctgaaaaggctgctactggacgttgcagagctcatgttccttcccagtatcagaaaggaaaaaaatcaagttacatttatagctaattttatacatttacgctctcttctagcaattctatctctttccacaatgcaaaggctgaactattacttctcaaaacttctattaaattatcctcctttagttcagggtagttttacagttgagtttggttttcataatctatgtagctaatgaaaataatctcatttccattaaaattaaagacagtctatgtaaaacagacgctaaattatactcacatgcattaagatcagaccaatatttttatgtttaataatttcctacaaataatattgtatagttgtgtgtgtcttatcttgttcatattttcaaaaggacccattcttgaccttgccaaacacaggaattttcataagcaccctaaaactaacacaaatactaaacaaaaactccaggatacagtcaggaagtttgtttccgtctcatcttagatagaaataggggctagaagagacagatgtttgtgggacagaagctgtggagctgaacccaatcagaaagttttaccttggctttctggcacttaacccttagagaactgtaccaaagagcagtcatttcagtgtcactatggaaataaaggaaatcagacatcttataatgccaagatgaagaaaaatgagaaagttgagaatcatctagttattttaaaccaagtcacctgtaaatcatttgctgatcaaagaacgtgtaaaatgttaccacctctgattctcacagaggtaaaatgttcaaaagctaaaaacaaggaagagaaatggaaagaagggacatactaaactaaatctgtcatataattaaggaaaaatgcaaaatactctgaaaaaatacatagacctattatttgtgcagtagacttcaattaacatttttcaaagaaggagtgaattctaacccatcttaaaggacattatagctgcatttataaagttggcttgggagataccagttatattgtataagtacacatacatgtataggatatgtgtatgctttcccataaggtagagcaaaaagaaggaaagcagaagacttgagtcatactatatttaattctctctttaaccatgatgtgatttattattgggggctctgtatttgctcagccacatctctcaattaatgcaaatcttgacaattttttatcaatcctgacaatttatcataaattctggctttttttgttgtgataggaacaaaaccctcattgtagaccataaatatctccttccattataggccagattcattctaaagagctggctatacattagcaatttcatcacagctagatcacagcaaaaataaataatagaaactttaaagctgatttgaaaatatttggaaaggaatttaaaatcctcggcacagtgtgtggcagctcagcttctaaagcacacagcagctgttgcctggctcgcatcttagaagcttctaagcctgttctctactttgcttcttttgtaccatagccatcttttggagttcttgattttggttcccctcctcatgttgtcacagtactcccaatgaccaacagtctccaatggccattaatatctgaaactcttaactggcaacaagtatgactgctaaactctgcagagctaggaaaccaaatatacttaactctgagactctaggcttcatggtttcctaagtttaaactacaaccaaaaaagtgtgtttgaactaaggactcgaccaactgaataattatattgaaaatatagattcccacctaagaagcaaagaaatagtttttttctaacaaaaatcagtttgttgtctatgtcaactgtcagattgttagaggtatgcttattatccgtatagaaaactactaatttcccatccagttttttttgggttttttttttttttttttgagacggggtctctctctgtcccccaggctgcagtgcagtggcatgatcttggctcactgcaatctccacctcctgggcttaagagatcttctcacctcagcctccaaagttgctgggaccacaggcacatgccaccacgcccagctatttttttatagagatagggtttggccatgttgcccaggctggtttcaaactcctggactcaagcaatccacctgccttggcctcccaaagtgttggaattacaggagtgagccaccatgaccagccctaatttccctttctatccaaggtgctttcaagtatggtttctaccttacatcagtagatatagcttcaggaatggaaactcatttaacatttgcctaataaaaatataactgagaagctaaatgtagggtacctcctccccccaaattggaattatatgtaaaacatactccattctattagtttggtaagagctaattacattttaagtggcttaaattattctttttatttttcttagttacttaatagtcttttttcttagaaataaatcgggacatagaattctgttcaaacaaattttatttccagacatttctactgtatttaactactgtcaggtactacttccagactgctaaaatttcaaaatggaagaaagactaacaattgacaatgaatctttattagaggaaggctaattgccaagtagtaggctatgctgcagctggcttttactaagtgactcatataataaaccagaacattctagagttgggctgtccaatacagtggccacgagctacatgtgactattttaatttaaattaattaaaattaaaaacaatttaaaactcagttcaacagccacacttgccacattccacatattcgttagtgacatgtggctgatgacgagtgtatcagacagcacagatgcagaaccctccattactcccatcactatagcactgttctagagcacaggattaaactcccaggttagtctagcccacagaggagcaccttgtaacacatttaaaatgcttcttaagttagaaatgaaagcctcataaatcagatttaaacaatagttttaaatcacatgtaatttcagcatctacttattattgtaaaagtgttgtataaatgcaaaacacaaaaaacagcagaaatgggacttaatcgttgcagaacgtaaacagtcctcaaagaaaaaatgactatcaagacatagcaggccaagtgcagtggttcatgcctgtaatcctagcattttgagaggactagacgggtgcatcacttaaggccaggagtttgagaccatcctgggaaacatggtgaaaccctgcctctacaaaaaatacaaaattagctgggcgtggtggctcactcctgtagtcccagctactcaggaggctgaggtgggaggatcacctgagcccaggaggtcgaggctgcagtgagccatggttgtgccactacactacagcctgggtggcaaagtgagatcctgtctcaaaaaataaaggcacaccagtaaaagtgccaaaataatgatgaaagatttcaaaaactatactttgaaactgcaacctgattaaatttaaaacccaagctgcatggtgaacacaagaatcttttctgcttgtgtattaacagcaaggggtctgtgttttcagctggcatcaactgttgtcctagctggatgccagctatctgcacctaatgacaaagtgacctcagatatcctcagcaagtgcacacgtgtgtggaatagctacgtaccttcaaacatactaacttgttcccagcatttttagatcttaaccatttccacagcttgacagagtcaaggaaaagctatccaattaaagggtttcttcacattatgacaatttttttaatgaattaacatctagactgccaatttgaactttaatatttctaaacatataatcaaatatcatatggatatgatctactttttagattgagctgaaataggccggtcttttaaaaaatttagtttgaaaactactctgctctatttcattaagataaaaatgggcccttccaaagaagattaaaatggatatcagggccaggcgcggtggctcatgcctgtaatcccagtactttgtgaggccaaggcgggcaggtcacaaggtcaggagatcgaaaccatcctggctaacatggtgaaacctcatctctactaaaaatacaaaaattagccaggcgtggtggcggacacctgtagtcccagctacttgaaaggctgaggcaggagaatggcgtgaacccaggaggcgcagcttgcagtgagctgagattgcaccactgcactccagcctgggcaacagagcaagactccatctcaaaaaaaaaaaaaaaaaaaaaaaaaaagccaggcacggtggctcacacctataatcccagcactttggaggccaaggtggacggatcacgaggtcaggagatcgagaccatcctggctaacacggtgaaaccccgtctctactaaaaatacaaaaagtgagccaggcgtggtggcaggcacctgtagtcccagctactcaggaggctgaggcaggagaatggcgtgaacccgggaggcagagtttgcagtaagccgagattgcaccactgcacaccagcctgggtgacagagcaagactccgtcgcaaaaaaaaaaaaaaaaaaaaaaaaaacaacaggtatcaaaatcctaccacaggccaggcgtggtggctcacacctgtaatcccagcaccgcgagagggtgaggcgggcagatcacctgaggtcacaagtttgagaccagcctggccaacatggtgaaaccctgtctctactaaaaatacaaaaattaggcgggtgtagtggcacacccataatcccagctactcggaaagctgaggcaggagaatggcttgaacccgggaggcagaggctgcagtgagccgagatcgtgccactgcattccagcctgagctacacagccagactccatctcaggaaaaaaaaaaaaaattctaccacagaaatacctcaacctggccgggtgcggtggctcatgcctgtaatcccagcactttgggggaccacggcgggtggatcacttgaggtcaggagtttgagaccagcctgaccaacatggtgaaaccccgtctctactaaaaaagtacaaaattagccaggcgtggtggcatgcataacgtcagctacttgggaggcttaggcaggagaatcacttgaacccgggaggcagaggttgcagtgagctgagatcacgccattgcactccagcctgggcaacaagagtgaaactccatctcaaaaatatatatatcaacctaatatttctaccgtgctcaatgaaatagtaaattcatgacattaataataataataataaacccagacaagttgggatatcctataactggataattcaataggtactttaagaattagattatctaatataaaactttagaaagattatgactgtaacaaacaactcaaagttttaaagaaatctcagagaaacagttattaaattcagcttcgttgagatcatactttgttaactgggactatcctctaaaatcttttggataatgttataaaaacaataccttctccacattagaactttataatctaaatctgagctgaaaattttaatcaatatgtagaaccaagaatcatcaagcactattgaagatttaaccaacattgtaccttctctggatgtaaaactgggaatacttgcactagtttactaataaataataactaaaaaaaacacgaattaacttagaatgcaaaccaagctgtgcagcccaattaaagtaaaagtaaaagcaatatactcaaatatctttagtaacaccattaaagtatttaaaatctctttccaaggtatctcagcaaagaggatttaaaatgttaacaggatccccccctcccaaagtagcctaccaactcaccatctgcaaaatcgctccatacagccgcaggagcactttccgaggctcatcaccaagggtggctgtggtgtcaggtagggagcactggaacagcatgttgctaaggccgcctctgtcagaaataagaggacagtaagtatctttattgcaggtgagctaaatcactcttcttggataaatatggatgaaaagtcagggttacacaagaactgttctcatcttatctcgatttattctctcaatttaactccatgagtcacattaaaaacagacaaattccctttctgtttttctgcagtagaggtggggaagcgtttttgaaattgcccgtgtgggccgggcacggtggctcacgcctgtaatcccagcactttgggaggccgaggcgggtggatcacaaggtcaaggaatctagaccatcctggctaacacggtgaaaccccgtctctactaaaaaaatacaaaaaattagccaggcgtggtggcaggtgcctgtagtcccagcaactcaggaggctgaggcaggagaatggcatgaacccgggaggcgaagcttgcagtgagccgagatggcaccactgcactccagcctgggcgacagagcaagactccgtctcaaaaaaaaaaaaaaaaaaatcttgaggcaatatttaaaccttcttctctagggctttccatttgatatgtattaatagttccaagatcttctacgctagtgttactaaaaatctgtcaactgattttgactaggagcttgttcaaaaaactcccaacattaactggttaccacggccttcagatgaaacaggagacctcaatactctaatcacacaccaagtaagtagctaagcaaggaatcaaacccaggcatatggctcgagtccctgcttgtaactaaccatgaagagttgtcaaagagataggaggcaaagctggagagcaccatgtgccacattaaagacattacaggaggtcgggcgcagtggctcatgcctgtaatcccagcactttgggaggccaaggcaggtggatcacctgaggtcaagagtttgacaccagcctggccaacatggtgaaagcctgtctctactaaaaatataaattagccgggtgtggtggcacacaccttgtaataccagctacttgagaggctgaggcagaagaatcgcttgaacccaggaggcagaggttgcagtgagccgttatcgcgccactgtactccagcctgggcgacagagtgagactcctatctcaaaaaaaaaaaaaaaaaaaaagaaaaagaaaagataaaagaaaaatgtcataggagctgcgtgagctgcaaaatcaccttccatcaggactactctctataaacctctatgacacaaacatctccatgtcctattactgctataacaaattactacaaatttagtggcttaaaactgaaaacagattctgatcgagctcattaatttttaaaaataagggtaactaggtggaaatggggagttggtttaagtttaatgggtacagagtttcagtttgggaagacgacaacattctggagacggatggtggtgatggcagcacaacaatgaatgtacttaatgccactaaactatatatttttaaattgttaaaattgtatttttaatgctgcttattttaccacaattttacttgattttatttatttatttatttttttcagagagggttttgctctgtcatccaggctagagtacagtggcacaatctcggctcactgcaacctccaccacccaggttcaagcgattctcctgcctcagccccccaagtagctgggattacaggtgtatgccagcatgcttagctaatttttgtatttttggtagaaacggagttttgccaggctgctctggaactcctgacctcaggtgatccacccatctcggcctcccaaagtgctagaattacaggcacaccatgcctgaccttattttaccacagttttaataaaaaagtatgaagtactgatatatactacaacatgaaacttaaaaacattatgctaagtgaaagaagacagtcacaaaagaccacatgttatatgattccattcatatgaactgtccagaacaaggaaatctataaagtccattagtggttgccaggagctggggtgggaaggggtacttaggggtaggggatgatagctaaaagtttctttttgaaagatgaaaatgttctaaaactgactgtggtaacagctgcaagtatctgtgattacactaaaagccactggactgtacaatttaaatgggtgaattgtatggtttgtgaactatatctcattttcttaccaaataaaaaatttgaatgtgcttctagcacaaacaattttttcccagatttaagtaagacatatttaagaggttttttcaaaggttacttaaaatgaaaaaccatcatgagtctctaggaacaagacagcaagagtcaggatctattttcccagaaggttgtctaccttagttaaaaagaacaaaaataaaagggaacccaaagttcttgttttcccaaagcaagctgtgaagcaggccgacagcgtgtagatcaaaggaaccaaaagcagccttaacctttctgttaaacttggcgtggcgcctcaactgtgtggcttatcagaatccccctgccgcgtctggtcacagccaacatgggtttctggctaccaagcaacagaacgggcattaaaacagagttaaaagccctagtttttcttccggtcacatactctggaaatctcagtcaaatgcaaaggcaaacagatgaagtactgttctaaattgtgtaacctgattcaaagtttacccccgtactgctaaagaaggaaggcagactagcttggccagaaacaagctcacaacctggaaacccttcaactgctttttattacctgtagcctctattgttcaataggttttagtgaataaattgtcaattattttttagtgacagtcaaaataaatgaagcaaggtgactggcaccaataacccaaactgtgagaaatttacctagaaaaaaagccaactaccaatgagtcaaataataatatgaccaggaacaataaaatgtggtaggaagaaatgccagaaatggtagcaaaaatgtaacagttcaatttatcatataatttgtcaaaaatatcctcccaagtaaaaccccaggagctctcaaggatttgcaagaagttttgaaaccacaaactttatcacctggcataatagctttataagtcataattagatatgagaggcatgggctggatgtggcggctcacgcctgtaatcctagcactttgggaggctgaggcgggcagatcacttgaggtcaggagttcaagaccagcctggccaacatggtgaaaccctgtctctactaaaaatacaaaaattagccgggcatggtggcacgtgcctgtaatcccagctactcaggaggctgaggcaggagaactacttgaacccgagaggcagagattgcagtgagccgagattgtgccattgcactccagcctgggggacaagaacgaaacatcatctccaataaataaatacataaataaataaataaataaataaataaatacaagagcgaaacatcatctccaataaataaataaataaatttaaatatatatatgcacacacacacacatatatatgagaggcacaagatactcaagcaaaatctcaaatacagtgacaataacacacttattccacactcaacacaatgacaggaaggaaacagaaaaaagcaggaagtacctgctggcaggaattctcacccctgccctccagacccagtggtgcacgcatcactaactgtcaacccatgattccttaaaacagaatactaagggaataacaagcagtataaagaggttcttttttttttttttttttttttttttttgagacggagtctcactctgtcacccaggctggagtgcaacagcgcgatctcggctcactgcaagctccacctcccaggttcacaccattctcctgcctcagcctcccaagtagctgggactacaggcgcccaccaccacaccgggctaatttttttgtatttttagtagagacggggtttcaccgtgttagccaggatggtctcgatctcctgacctcatgatctacctgtctcagccccccaaagtgctgggattacaggcgtgagccaccacgctggtccaaagaggttattttacataaattgttgagcaaaaatgaaatgaatcatttcagcttctcttgatagccagaaaaacaaggcaagagaaagaaataaaaggcatccaaattggaaatgaagttaaattatccctgtttgcagacaacatgatcttacatatagaaaaccctaaagaccccaccaaaaaactatgagaactaataagttcagtaagattgcaggatacaaaatcaacatacaaaaatcagtagcagtattatttctaaacgggaggctcaggtgggaagatcacttgagcccaggaggtcaaggctggagtgagctgtgatcacgccactgcatgccagctaatagcaaattatctggaatggaaatcaagaaaacaatcctgtttacaatagctaacaaaaaaaaaaagaaaagaaaaagaaagaaatttaaccaaggaggtgaaagagctctgcaatgaaaactttaaaatattgatcagagaaactgaagacacaaataaatggaacaatatcccatgttcatgtattagaagaattaatattgttaaaatgtccatactggccaagcgcgtggctgacgcctgtaatcccaacactttgggaggctgaggtgggctgatcacctgaggccaggagttcaagaccagcctcgccaacatgataaaatcctgcctctactaaaaatacaaaaattagctgggcatggtggtgggcgcctgtaatcccagctactcgggaggctgaggcaggagaatctcttgaactcaggaggcggaggtggcagtgagccaagatcacgccactgcactccagcctgggtgacagagcaagactctgtctcaaaaaaaaaaaaagaaaaaaaaaagtccatactacccaaagcaatctatacattcaatgcaatccctatcaaaataccaatgacattcttcatagaaataggaaaaccaatcctaaaatttatatgaaatcacaaaagaccccagtagccaaagcaatctggagcaaaaagaacaaagctagaggaatcacactacctaacttcaacatatactacaaagtcatagtaaccaaaacagcatggtgttggcataaaaacagacagagaccaatataacagaataaaagcccacaaattaatccacacttacagctacctgattttcaacaagtgtcaagaacacaatagggaaaaagacagtctcttcaataaacagtgttgggaaaactggatatcgcacgcacaagaatgaaattagatccttatctcacaccatatacaaaaataaactccaaaatggatcgaaaacttaaagtaagacctgaaactatgaaactgccataagaaaacatagggaaaaagcttcatgaccttggtctgagccaggaattttttttaaaagacctcaaaagcacaggcaacacaaacaaaaataaacaaataggattatagcagactaaaaagcttctgcacagcaaaggaaacaagagtgaagaaacaacctacagaatggaagaatctatttgcaaactatacatcagttaaggggataatatagaaaatatacaaggaactcacagcaaagaaaggaaaggaaaccaattaaaaaatggacaccagctactcaagaggctgaggcaagaggatcactagagcccaggaagtcaaggctgcactgtactttagcctgggtgacagagcaagaccctgtttaaaaaaaaaaaaatatatttgccctaaatggtggcgtgtgcctatattcccagcttgggaggctgacataggaggattgtttgagcctaagagtttgaggctgaagtaagctatgaatgcaccactgtactccagcctggatgacagagcaagattccatccctcaataacaaaaacaaggcaaaagacccaacagacatttatcaaaagatgacaaataaatggccagaaagccacatgtggtaggtagcacgtgcctgcagtcccaactactcgggaggttgagatgggaggatcacttgagcctgggaggttgaggctgcaaatgagctgtgattgtgctactgcactccagcctgggtgacggagcaagaccctgtctcagtaaatttaaaaaaaataaaataaatggccaacaggtatatgaaaaaatgctgaccaccactagtcattattagactgtctattttcaatgataaaagataacaaacgttgacaaggatgtggagaaaagggaacccttacacactgttgatggcaatgtaagttagtacagatatgaaaaacagtatgcagggtcctcagaaaattaaaaatagaattaccattaagatccagctcctgctcatcaaagcaagtttaaaaaaaaaaaatccaggcttggtgcagtggctcatgcgtgtaatccccgcactttggaaggctgaggcgggcagatcacctgaggtcgggaattcgagatcagcctggccaacatggtgaaactctgtctctattaaaaaaacaaaaaaattagccacgcatggtggtgtacatctgtaatcccagctatttgtgaggaggaagcacgagaatcacttgaacccgggaggcagtgttgcagtgagccgagatcacaccactgcactccagcctgggagacagagcaaggctcagtctcaaaaaaataaaaaataaataaattaattaaataaaataaaaaattaaaaatccagcaatcccattactggtaatacatccagaggaaatgaaatcagtacatcagacatctacactctcatgtatattgcagcactagtcacaaaagccatcaattgattatagaataaatgtaagtgtccatcaacagatgaataaagaaaatgtggtatatatacacagtagaatcctattaagccttataaaagcaggaaattctgtcatttgtgacaatatggatgaacctggaggacagtacttatattaagcaaagtaagtcaggcacagaaagacagtaacaatgtgatctcacttgtgtagaatctaaaaaagttgatctcatagaagttgagaatagtgcttaccagaggcgaggggaggggagacagggagaggttggccaactggtacaatattatagtcagatggaaggaataaattcaccttatacctcataaataggacaattattattattattattttttgagactgagttttgctctatcatccaggctggagtgcaatggtgcaatctcggctcaccgcaacctccgcctctcaggtttaagcggttctcatgcattagtctcctgagtagctaggattcaggctcccactaccatgcccagctaataatttttgtatttttagtacagatagggttgcaccatgttggtcagctggtctcgaactcctgacctcaagtgatccaaccgcctcggcctcccaaattgctgggataacaggcgtgagccaccgcacccgaccaatatgtacaattattacatgtcaattataaacattatgaataatgctccattgcctcagcacttacatcaaatacacaggttataaaattataaaattctggccgggcacagtggctcacgcctggaatcccagcactttgggaggcaaagacgggcagatcatctgaggtcaggagttcaagaccagcctgatcaacatggtgaaaccctgtctctactaaaaatacaaaattagccaggcgtggtggcacatgtctgtaatctcagctactcaggaggctgaggcaggagaatcgcttgaacccgggagatggaggctgcagtgagttgagatcgtaccattgcactccagcctcggcaacagagtgaaactccatctcaaaaaaaaaaagagattatttaatgcctgttacattctatagcactataaaacaagaaaaacccatgctacatgctacagtgatacaacaacttagtaggctgcccaaggtcttgaaatatgtcatctctaggccggacatggtggctcacgcctgtaatcccagcactttgggaggctgaggcgggtggatcatgaggtcaggaattcaagaccagcctggcaaacacggtgaaaccccatctctactaaaaatacaaaaattagctgggcatggtggcagacacctatagtcccaactactcaggaggctgaggcaagagaatcgcttaaacacgggaggaggaggttgcagtgagccgaaatcgggccactgtactccagcctgggcagcagagtgagactccatctcaaaaaaaaaaaaaaaaaaaaaaaaaagaaaagaaaaagaaagaaatatgccatctctaatgtcaaacatctacctatttttaattatttgggttttttcccctgtcatttttagcaacggggatattttgggattcatgtatgtgaatccgctgaatgaatgcttaggcagatgacaaacctgaggaactgtctgctccaacctgtaacacaaagatttccacctgataaattaagataagaagttacctaaccaactatattttgctgaaaagcaaaaaagccactgaaagctccgcaaactgtctacaagtcacagggtacccagtctagcacatacagggcttagtccccaaggctgagggcctggacctaggagaaaatagagcaggcagttccatgactatcatctaaaagtcaaaatgactagaaagaaaaaaaaatcacgacataaccagtgtctcaacagagaaatgatctttaagccatagggctggctacatggaaaagagaatacagcgtaatatcaaaacagctactgaatttagagcacaaggaaaataagaaaaaaaagcagatttttgaaaaatttcttctaaccatctaaaattcaaattgcagctatggctcaggtgaaaaaaacagtgctgcagtaaaacatcagcacctctacggagtaatcaggacggtattaacccccacctctctgaaaacaagaaaagccaggaggtaccattaaaagaacaggctaggccaagcacagtggctaacacctataatcaatctcaacacttcaggaggtcaaggtgaaaggattgcttcagcccaagagctggagaccagcctaggcaacataacaagactcgatctctacaatttttttttttaattggccaggcatggtggcattgagcctgtggtcccaggtacttgggaagttgaggtgggatgactgcttgagcctggaaggttggggctgcagtgagccgtgatcacgtcactgcactccagcctgggcaacacaaaaaccctgcctccaaaaaaaaaaaaagaccagtccagcccaggtggagtgctggctctgcacaaaatagctgtgcagaccttgggcaggcctccaagtctgttttcacaccataaaacaatgtagcagtatctaacagaagtttctgcgaaaattacatgagatcatatgagctgttcacttatcagcaccaattgcaaagcaaaggttaatgtttaagaggatgccagaaggaagaaaggataaagctcagtcttaagaattctactccagcacggctcagccttgacgctttgtatctggggccaggtcattctttgctgaggggcaaagctgccctgtgtactgcaggaatgtttagcagcaacactgccctctattcactagatgccagctgtactaccaccaacatggtaacaataaaaaacatgttcggccgggcatggtggatcatacctgtaatcccagcactttgggaggccgaggtgggtggatcacgagatcaggagttcaagaccagcctggccaatatggtgaaaccccgtctctactaaaaatacaaaaattagccgggcgcagtggcaggcacctgtaatcccagctacttgggaggcttaggcaggagaatcgcttgaacctgagcagcagtgatttcaatgagtcaagattgagccactgcactccaacctgggtgacagagtgagactctgtctcaaaaaaaaaaatgttcaaacattaccaaatggcgagatgcgggtacaaaatcaccccactattcctctactttttttatcattctttctgcagtttttacctatttttccttccccaaaatttgaaaaccaatttgttctctaacttgattcccaacttataatcttttccttcctctattcaaaataatttcttcctcctgatttgcctatttcagttaacagtagtgcctttttcccactcacccaggctcaaaatcttcctcgtttccaatggcctggtcctctccctatctcccaaattctctcctcctttccattctcaatgctcctgcccaaatgtatatcctcccccaacccccactacagcagcctcctctctggtctcccagcttcttgatccctctctcctctatgctatcccctaggccaccttagaaagtgtttctaaaatacaaatttcaagccgccactgtccttagcacagtccttggaacacagcatgcctctgcctacccttcccacctaggaggtccttccaccaggcatggtcagaagtactccctcccactttctcataaagtgcttgcatcccttctagcccacgctgactcccagtcaatactcgacaaaaagagtactaggcacattaagatgtgtaaatacattacgaaagacacggaaattacgatctcattgtggaaaactaaagataagggttgtgccccaccacgcagcagaacgaggagattccctgccactgacagagaatggagagatcctggaaggacgctagacaggctgacggggctccactggaggggaaaacaggaaggagaacgtgggcatcactgaaagcaatatatgacagataacagaagaagtgcttttattattattattatctaaattctactcctagctgggtgcagtggcacacacctgtagtcccagctaatgaggagggtgaggtgggatgatcgcttgagcccaggaattccaggctgcagttgagctatgatcccacaaatgcactccagactgggcaacaagagcaagaccctgtctcaaaaagaaagaaagaaaagaaataccactcaaccttctggtttccagtccagtatgtgtaagaagcttagaagtcgccacctgatcctaacaacatgtaaaaagctaaatcaactgaaaaatcaactcttaaagaaataaggtggctgggcgcagaggctcacgcctgtaatcccagcactttgggaggccaaggcgggaggatcacgaggtcaggagatcgagaccatcctggctaacacggtgaaactccgtctctactaaaaatacaaaaaattagcctggcgtggtggcgggcgcctgtagtcccagccacttgggaggctgaggcaagagaatggcgtgaacctgggaggcggagcttgcagtgagccaagatcatgccactgcactccagcctgggtgaccgcaaggctctgtctcaaaaaaaaagaaatgaggttaagggggaaactgctgcctcccaaattggacagacagaccggcagatacagagaatcacagtttactggagcaaaatcctccaccaaatcagcactagggtaggaaaaccttaactataactaacaaattgccggaggctcagtgtggacaactgtgagagtttaaaactccaggagacccaattactggggagccccattctttgacgagttttacctccaggagctctacgagttccttacagtgaaaactgagggggggaaaaaatcccttcatgcttccagcagagggaggggcaaagaaacctttccttttttcttttcctttttttttttttttttttttgagacagagtctcgctctgtcccccaggcaggagtgcagtggcgcgatctcggctcacagcaagctccacctcccgggttcacaccattctcctgcctcagcctcccgagtagctgggactacaggcgcccgccaccacactgggctaattttttgtatttttagtagagacggagtttcaccgtgttagccaggatggtctcgatctcctgacctcgtgatcctcccgcctcaggctcccaaagtgctgggattacaggcgtgagccaccgagcccggcctcttatatttttaaatacgacagaacattctgttcttaacaaggtctgccctcaggagaaattattttgccagtgtctaacctgttgggattttctcagagcctaaacttcctgagagagggcaaatacacaattccagccccctctggccattctgtcccacctaagcggggaggagaactaagaaaaatgggtaaagttcacagtctaggtgcacaggctcaccaaaagactgagacctcaccataggactataggttaaacattcaaaaatcaacaataggctggatgtggtggctcgtgcctgtagtccagcacctggggaggccaaggcaggtggaccacttgaggtcaggagttcaagaccagcctggccaacatggtgaaaccctgtctgtactgaaaatacaaaaattagctgaatgtgatggtgcacacctgtaatcccagctactcgggtgactgaggcatgagaattgcttgaatccagggagtagaggttgcagtgagccgaggtcacgccactgcactccagtgtgggtgacagagcgagactctgtctcaaaataaaaaataaaaaataaaatcaattaatataatctatcacatcaacaggctaaagaagaaaaatcacatgatcatatcaatagatggagaaaaactatctgacaaaatccaacacccactcatggtaaataataaactctcagaaaatgaggaatagagaggaacttcctcaacttgataaagaacatctataaaaaacctacagctaacattatacttgatgagaaagtcacagcttttctacgaagaacaggaacaaggtaacaatgttccccctcaccacttttttccaacatcataggaagtcctaactaataagaaaaggaaattaaaagtatacagattaggaagagagaaataaaactttgtagatgatatgattatctatgtagaaaatcagaaagaagtgaaaaaaaatttctggaataagagattatatagcaggactgcaagatacaaggttaatacataaaagtcaaccagtttcctacataccagtgacaaataagtggaatttgaaattaaaagcacattaccatttatatgagcacccccaaaaatgaaatacttatatataaatctaacaaaatgtgtattttgttatgtcactcaatgtgtattgagtcatgggtaggaagactcaatattatcaagatgtcggttcttcccaacttgatctgtagatttaatgcaatcccaatgaaaaccccagcaagttattttgtgaataccaacgaactgattctaaaatttacagggaagccaggcacagtggctcatgcttgtaatcccagcaatttgggaggccaaggtgggcagatcacttatggtcaggagttccgagaccagcctggcaaacatggtgaaaccctgtctctactaaaaatacaaaattagctgggcgtggtggcatgcacctataatcccagctactcgggaggctgaggcaggagaatcgcttgaatccaggaggcggaggttgcagtgagctgggatcacgccactgcactccagcctgggcaacagaatgagactccatctcaaaaaaaaaaaaaatgataataataataaagtttatcaggagaggcaaaaaacctagaatagccaatgaagaataaagtcagaggaccgacaatactcaacctcaagaatcattatgaagctacattaattaggccaggcgcggtggctcatgcctctaatcccagcactttgggaggccgagctgggcagattacctgaggtcaggagttcgagaccagcctggccaacatggtgaaaccctgtctctactaaaaatacaaaaattagctgggcgtggtggtgggcgcctgtaaccccagctactggggaagttgaggcaggaaaattgcttgaacctgggaggcagaggttgcagtgagccgagatcgtgccattgcactccagcctgggcaacaaaagccaaactccatctcaagaaaaaaaaaaaaaatgagccaggtatggtggtacacacctgtaatcccagctactcaggaggctgaggcatgagaatcacttgaacccgggagacagaggttgcagtgagccaagatcatgccattgtactccagccaagacactatctcaaaaaataaaaataaaaaagctacattaattaaaacagtgtggtattggcaaaagaaaggacaaatggatcaatggaacagactagagagtacagaaatacactcacatagtcaacagatctttcacaaaggagcaaaggcaatacaatgtaacaaatgtcttttacaacaaaccatttgttgtttcaacaaatggtcctggaacatgcccggagcggtagctcacacctgtaatcccagcactttgggaggctgaggcgggtggatcacttgaggtcaggagtttgagaccagcctgaccaacatgaagaaaccccgtctctactaaaaatacaaaattagccaggcgtggtgacgcatgcctgtaatcccagctactcaggaggctgaggcaggagaatcgcttgaacctgggaggtggaggttgcggtgagccgagatcacgccattgcattccagcctgggcaacaacagcaaaactccgtctcaaaaaaaaaaaaaaaaaaaaaaaaagtcctggaacaacgggacgtccacatgcaaaaaaaaatctagacagacgttacacttcccaaaaattaaatcaaaatggatcataaagctaaatataaaatgcaaaactagataatttcttgatggtaacatagaagaaaatctagatgaccttaggtatggtgattgcttttatttatttatttactttttttgagacggagtctcactcttgtcgcaacagtctggagtgcagtgccgcaatccaggctcactgcaacctccgcctcccgggttcaagcgattcttcctgccttagcctcctgagtagctggcattacaggtgcccacgactacaccagactaatttttttgtatttctagaagagacagagtttcaccatgttggccaggctggtctcaaactcctgacctcaggtgatccacccatcttgtcctccccaagtgctggaattacaggcataagccactgcgcccagccagattacttttagatacagcatcaaaagcatgatccatgaaagaaataattgataggccagacttcattaaaattaaaaactgctttgcaaaagatactgtcaagagaatgaaaagtcacaaacaaggaaaaaatatttgcaaaagacacatttgataaaggactgttaacaaaaatatataaagaactcttaaaactcaagaataggaaaacactttcccactcaagaaggtgtggcaggtgcctggcacggtggttcatgcctgtaatcccagcacttcgggaggccgaggcaggaggatcacgaggtcaggagatcaagaccatcctggctaacacagtgaaaccccatctctactaaaaatacaaaaaattagccgggcgtggtggcagccgcctgtagtcccagctactcgggaggctgaggcaggaaaatggcgtgaaaccgggagacggagcttgcagtgagccaagatcgcaccactgcactctagcctgggcaacagagcaagactccgtctcaaaaaaaaaaaaaaaaaaaaaaaaaaaaagaagctgtggcaggaaaaaaaaaaacaattaaattaaaattttaaaatgggcaagaagctctgtggcatgcccctatagtcccagatacttgggagactgaggcaggaggaccacatctgtgaatacccactacactcaagcctgagcaatgtagcaagacccagtttcttaaaaaaataaaaaggaaaaagaaaaagacacaaactgacatctcatcaaagaagatatacagatagcaaataagcatctgaaaagattttcatcatatgtcattagaaagttgcaaattaaaataagatacctgactgggcgcggtggttcacgcctgtaatcccagcactttgggaggccgaggtgggcagatcacgtgggtcaggagttccagaccagcctgtccaacacagtgaaacccacctctactaaaaatacaaaaaattagccgggcatggtggcaggcgcctgtaatcccagctactcaggaggctgaggcagagaactgcttgaacccgggaggcggaggttgcagtgagccaagatcacaccactgcgctccagcctgggcaaaagagcaagactctgtctcaaaacaaaaacaaaaaacagccaggcgcgatggctcatgcctgtaatcccagcactttgggaggccgaggcaggtggatcacctgaggttaggagttcaagaccagcctggccaacatggtgaaaccccatctctaaataccaaaaattagctaggcgtagtggcaggtgcctgtaatctcaagaactcaggaggcagagacaggagaatcgcttgaacccaggaagcggaggttgcagcaagccgagatcgcgccattgcactccagcctgggcaacaagagtgaaactctgtctcaaaaaaaaaaggaaagaaaaagaaaatgagagaccattatacgcctaccagaatgaccaaacaccagaatgctgacaccaccaaatgctagtaaggacatagaataacaggaaatctcattcactgctggtaggaatgcaaaatgttacagctactctggaagacagtttggcagttccttacaaaactaaacgtaactctcaccatatgaccagcaatcatgctcctaagtatttacccaaatgaattgaaaacctacacacaaatgtttagagcaactttattcataattgccaaaaccgtgaagtaacccagatgtccttcagtagatgaatggataaataaactgtggtatatccagatgacagaatactactgagtattaaaaagaagtgagttatcaagccatgaaaagacacagggaggctgggcacaggggctcacccctgtaattccaacaccttgggaggccaaggcaggcagatgacaaggtcaggagttcgagaccagcctggtcaatatggtgaaaccctgtctctactaaaaatacaaaaaattagccaggcggggtggcacatgcctgtaattccagctacttgggaggctgaggaaggagaattgcctgaacccggaaggcggaggttgcagtgagccaagatcgcaccattgcactccagcctcggcgacagagcgagactctgtctcgggaaaaaaaaaaaaaagaagaagaaaagacaagacaagacccagggaaactcagtgcatattatcaagtgaaaaaagccaaactgaaaagacttacatactgtgtgattccaattctatgacattctggaaaaggaaaacctatggagactgtaaaaagaccagtgattggctgggcttaggagggaaagagggataaacagacattaagtagaggatttctagggcagtgaaactattctgtatgacactacagatggtctccaacttatgatggttcaacttatgatttttcgactatacaatggtacaaaggtgatatgtattcggaagaaaccatacttcaagtaaacatacaaccattttatttttcattttcagtaatcaataaattacatgaaatatttaacactttattataaaaacagactttctgttagattactttgcccaactgtaagctaatgtgtaagtgttctggcaaattaaaggtaggctaggctaagatatgctgttcagtagattcaatgtattaaatgcatttcaatttatgatggtttatcagggcataaccctgttgaagtaagctcatcatgtaaagcagcatcaatacaatggtggatacatgtcattatacggtggccaaaaaccacagaatgtacaacagcaagaataggatgtagtgtgttatggactctgagtgataatatgtcaatgtaggttcctcagttgtaacaaatgtcccattctggtgggggaagttgagaaaggggaaggcagtgcctgtgtgcaggcagggggttatatgggaactctctgtactatctgctcaattttgctgtgaacctaaaactgctctaaaactgggcacagtggcacacacttgtaatcccagctactaaggtggctgaggcaggagggaccacttgagcccaggagttcaagaccagcctgggtaacacagtgaaatcccccatttctaaacaaacaaatacaagttgctctaaaaaatatagtgtattagtttaaaaaggaagaaagaaaaagaaagccagcaagccagccacccaaggaacaaaactttccagtaaaaacaaagtgtaaataaaattgtatcttgaaaaatgaaattgaaaattgtttctgttcttatatgtaacataatttaggttataatacaactacatatttatgtttaatttgaaaagcaaacgtttaaaatgaaaagtagggagtttgggcacaatttttccaaaaaaattatgatggcaccataagacacaattaacttcctatgtgagttttactgcattaattttacagtatctgaggacttggccagtcttttcatgggactctctccatcttttgatatgattctattttgcagggcccaaggtagcatcctcctcaatggttttcttttcactgttagtgggtctgtggaacgtaatgtcaaaagatgtgtgtgaaacttagtctccaacatttcattcattgaacttcatgaaatcttgtatccttcacaagattttaaacttcatttcacaactgctgtgaccttatcaatcagcaatgaaaataacaaactctaagctgggtgtggtggtttacgcctgtaatccctgctctttgggcggaggcaggcggatcacctgagcccaggagttctataccagcctgggcaccatggtaaaaccccgtggctaccaaaaaatacaaaaattagccaggtagccaggcgtggtggctcatgcctgtaatcccagcactatgggaggccaaagcaggcggatcatgaggtcaggagttcaagaccagcctggccaacatgtgaaaccttgtatctactaaagataccaaaaaaaaaaaatttagctggacatggcatgtgactgtaatcccagctactcgggaggccgaggcaggagaatcgcttgaacctgggaggcagaggttgcagtgagccgagatcgcgccattgtgctcccgcctgggcaacagagcaagactgtcttaaaaaaaaaaaaagaaagaaagaaagaaaatgctaataacatactattgatttgataggcagggacagaagttagtattaagttgtgatgtctggaaatgaacaaattttctaagtggtcagctcattaacaacaactctcatgttaggacaatttttatttttccctataccactcatagttgaagagactcagacaaggatctccgttcatcacacagcaaagaggccaacttaagctaaaaatgacaatttctacacttatccagttccggtgtgccaggcactatcctagtgctggagatacaaagatgaacgtgaaatgccctctaggaattcaatctaacaagagaatggaatgaataaacacacacacaaacgtgttaagggttgtgataacaaggcctgcatgtacaaagtgctaaggatgagacacagaggggaaagaaattcagtatgtctggttctctctgagttaagccttgaaagaggaattttaaaggaaacacaccaagggaaaggctgccaagcagagggtaggggcaaagaaaggcctggaaactgaaaacacaaagctcattcagaaaatgcaggctccagtgtaactagctcaatgttagttgctgtggttctggagaaggagtgattttaaaacagtaataacaaaaagaaccagtctaaaaagttaggccgggcagggtgcagtggctaacgcctgtaatcccagcactttgggaggccaaggagggtggaacacctgaggtcaggagttcgagaccagcctggtcaatatggtgaaaccctatctctaccaaaaatacaaaaattagccggatgtggtggtgcatctgtagtcccagctactcgggaggctgaggcacaagaatcgctcgaacccaggaggcagaagttgcagctagccgagatcacaccagcctgggtgacagagcaagactccatctcaaaaaataaatttaaaaataaaaaataaaaaggtaggccaaggctcaagtttagaccatgcaaacaagtttggattttattttccaatatttgagaaatccatagcaacaagatacagaatggattagaaggaacacacaaaatgcaagaagatcctaaggcacctcctgttctagtgtctaagcaaggacagcaaagggaccagacagaaggtggggatacaaaagtagctcatcaggtttgagttacaactgtgtgcagaggagggatttctgggggaatgcagagttagaaatgatcctggggctctggccaggctgctgctacaaacgcagagcgaaagcagaagcacattcctgggtggggaggagccaaagggttaaatttggaataggaatgcactgagttgaggtggtgaagtctcatcaactactgcagatgcactggcactcagtgaaacacggagctccagaaacggatcggggccaggtatggtggctcaggtctaaaatcctggcactttgggaggctgaagcggaaggactgcttgagctcaggagttcaagaccagcctgggcaacatggcgaaaccccatctctacaaaaatacaaaaattagccagtaatggtggtgcgtgcctgtagtcccagctacttgagaggctgaggtgggaggatcaccagagcctgggaagtcgaggctacagtgagctgtgatcacaccactgcactccagcctgcgcgacagagtgaaaccctgtctccaaaaaaaaaccaaaaaccagaatcagattgggaaatgtcagtaaaatttgatagctggagccataataactgcaactgcctatggagaatcactgaatttcaaccagacgaattcctctccttctccgcacctccaaatgcccttgtgtcttttttaaaagctagacatcacccactttcccatgtcctaaatcacctttttttctccttattaaacttattccataactacgttctctttcagaacacaggactgagagagtgtactcttgcaacattatgtaaaaaggtcatccaatccaaaaggaaagctgtgttttccaagactgctaactcctggagaaaagaaacaagacatcctcaatgctttcctaataactggtttgagcaaaatgcaaaagtttaactgctgagtgactctccctggagaaagccatgaaaatatcttaaggctggatctagggtgtccaaacattttcacaggccgcaggctagagcactggtgcaggagaaggggacaccagagacctggcagttcaggctttgaaggcagtaaacagccactgacctcaggcaagtcacttctcctttaggttttccatttcacagactgatgagtacatggcctaaaatgatcgcccttctagttgagaattttcaggcctaactaaaagtagattaaagtaaaccttggagagagctgaattttttttaagtgccattaagcaattcagggattatctaaacagcctcggttttcttttctctgcttccttaccaactgcctattaactctcactcttagctcataagcagtcagaggggctgaagcacaaagaggaagtgaagctcaaagagttaattttgctgcattagcggctctggtgaaagacagtgggcacagaaaaggaatcaaatgaccaaaactggacttggggattactggtggcagccagccagcaaatttctagatactgcacacaacctgtcagccaattaaaagaaaattggcagaaaatgacggaacacgttctttgtttttgtttttttgagacagtctctctctgtcaaaggctggagtgcagtggcgtgatctcggctcactgcaaccgccgcctcccaggttcaagcgattctcctgcctcagcctcccaagtagctgggactacaggtgtgcgccaccatgcccagctaatttttgtatttttagtagatatggggtttcaccatgttggccaggctggtctcgatctcccgacctcgtgacccgcccaccttggcctcccaaagtgctgggattacaggcgtgagccactgcgcccggcccgggaacacatctttaaaggtctcaatagaaggatgcacacactacgttgaatggttatgtcttcggagcagagtggtgaaagaaggtcagacttctgttaagtctgaatacctacacgcgtacttctgtaattcaaatttaagattaaatattttcaagtttaaaaaaaggaaaaaatggccgagcgcggtggctcatgcctgtaatcccaacattttgggaggtcgaagcgggtggatcacctgaggtcgggagttcaagatcagcctaacgaacatggagaaaccttgtctctactaaaaatacaaaattagccgggcgtggtggcgtgtgtctgtaatcccagctactcgggaggctgaggcaaggagaatcgcttgaacacgggaggccgtggttgcagtgagccgaggtcgcgccactgcactccagcctggggaccaagagcgaaactccgtctcaaaaaaaaaaaaaaaaggaaaaaacatttctaccttactcttattttaggagccacgcctcccacctttgtctagtaacacagctatagtgatgtctcttaggggatgagaaaatgctactcctccactaacaatgactcttggagagggaacaagacatcaaatcgcgaactcgaaaaactaacagaaaaaagttaaaaagtggtttgtgtttttaaagccagccacaacaccttcattcaaggccctaaaccgcagagactttctagacctatcttaagcgtcagtaccacacgcacttcgtgatggaacggtattgttctcctagaacagacccgttttctcatgaaaccgacgtttttacaaaagcctgtttgtggacggcctgcggcggccgcgaacccgcttcccttggattacccagggctgggagaaggagggctttcgccggctgcggtccccggtccccggcctccgccccggccccggctcccccggcccccgacccccccggcccacgccccctgcccggaccccgccccggccccgccccgcgtcacctgactgtcccgcggcccccagacccggcgccaccgacctgatgacactgatgtggaactcgtcctcgcggaggccccgccaggcgccgggcaggaactccttgcaccacagataggccctgcgccgcgtccggggctccggctgctcgtctgcgggcggctgcggcggcgggggctggggcagcggcagcggcagcggcagcggcggcggagggggcagcgcgagcggcggctgttggccgcccagctgcttggactcgaggtcgctggcggcgtcgcgctgctgccccacgccgggcgccggggccgcgctgccgctaccgcagctcagcagcagcccgagcggcgagggctccgcctcgcccccggtgcagaatttggttttcatgcccgacaggcggccgaggaggcgcgggcggccgcagcgcgagaggactaggctcagagtccggccgggcgccccctcgccgctctctcactggcaggccggcggggcagggggccgcggcggttgggcgcgcggggcggcggcggcggctgcggcgactgcggcgactgtggagcggggatgtgctgctggccgctgcactcgctcctctgccgccgccgcacgaggagcgccggccgcgtcacagcccgccctcgcgctcgccactgattggccgccgtccgccggcccggcgcatcataaccgccgccgccctcgccacaccgcctccccattggctgcggcgccgcccccaacccagagcgctgcggcctccgtgagcggggcctgggcgaagggggcggggcgtcgagggggcgccccggcggtcgcagggaagggggagaggggagcgaggcgcggggggcgccgggagagcgcctccgcggtgggacggagccggactgggccgagcgagggaggctcctgagcctcggaggaccccggggttggctttgggagctgaaagtttccttggacccctcggaagccccgtgacatcagaggccgggcctggcaggggcaggcaggaaacgtgtctggaggctactgccctctccgcgtgaccttgggcgagcagcctcctcctggggctcagtgggtgtgattttgtaacatttcccagcgctgccacaggcgcgtctcgccctgtccaacgcggagcccgaagaattactaagaaaccgaggtctgaaggagggaagaggtgacgggctcgaggccacacggtgggccaggctgggcccggctgcacgccggctaccggggcccagccctctgcacgcctcccgcagcctcagtttccctgtccgtggtactgaggatgctcgggcctagaagttcagggctggaggcccagggaccgtcgagggaggggcatcatccccgccatggggccgccgcaactgcccagagcacaggccaaaggtgcgtgccacggggctactggcgttgtggacgctgcccctgcctccccatcccccgcaggaaacagccttgtgaccgtgactaacgcacctttgccggggtagaggggcaagggcccctgctaccgtttgccacacactgccccatgtccctcactgctcccgtccttcctagaagtgaggtgctgatacatataaaaattatggatcccattttatgggacatgagctgaaacaggaggtttcctgggctgccaggggcttaggaaatccagtgcctgatacacaggaaatgcttctatgtggggagttcacagtcttccagaagcaaaaatgttttttggttttttttttgagacggagtcttgctcagtcgcccaggctggagtgcagtggcacgatctcggctcactgcaacctccgcctcccgggttcacgccattctgctgcctcagcctcccgagtagctaggactacagacgcccgccacgacgcctggctaattttttttttttttttttttttttttttgtatttttagtagagacggggtttcatcgtgttagccaggatggtctcgatctcctgacctcgtgatccgcccgcctcggcctcccaaagtgctgggattacaggagtgagccaccgcgcccggccgcaaaaatcttttagagtgtgtacttggctgaacttgctccacgcaaaatggtcttatttaaggataaaaatgaaaggggacttttgtaaggctgctgtggcgacaggcctggaagttgacctgcagggaggtaggagagaccaaggcccctgggacggaggccggccactggatgtttgaaaggctgagaagccaagggcttcaatctggggaggccgtttggataaaggagccaaggactttctctaaaaataccggctcacagggaggtggggccatgccaatggcctgcccaggtgacaagccctttgtcccactgtcccctggcaccagtctggtaatctcaaaggaatgccagaaatctggccaggaggaagggacactaaagtaaggagtggccctctataatttgaaataactctttctggcatctgctggcttttgttaggaaaagcctcagacatttttatgggatcacagttccctgtgggaggaagaggttgcctcaaggccaggcatggtggcttatggctgtaatcccagcactttgggaggccaaggcaggaggatcacttgagccaggagtttgagaccagcctggccaacataacaagactctgtctcgccgggcgaggtggctcatgcctgtaaccccagcactttgggaggccgaggtgggcggatcacaaggtcaggagttcgagaccattccggctaacacggtgaaaccccatctctactaaaaatacaaaaaaaattagccgggcgtaggtggtgcatgcctgtagtcccagctactcgggaggctgaggcaggagaatggcataaaacccaggaagcggaggttgcagtgagccgagatcgcgccactgcactacagactgggagacagagcgagactccgtctcaaaaaaaaaaaaagactgtctcaaaaattaaaaatgaaaaaaaaaattaacagagcattgtgtcttacacttgtccgactacttgggaggctcagccaggagcatcacttgagcctgggaggtcaaggcacccactgcactccagcctgagtgacagagtgagaccgtatttgctgaatgaatgaatcagtgagctcctggctcagcaattattaacttatgactttgggctgagcctcggtttcctcaactataaaatggggattataataccccgagcatccaggattgagagaatgtatgcaaaatgcatagcatgcaagaagtaaccgtttggttgcgtgcagtgcattgcatggcgttgcctctgccagtggttggttttcggagatgaataatgcatgcacttgtagcatttcacagcttgggaagacagtgtcgtataagaaaagaatttgggccgggtgtagtagcttatgcctgtaatcccagcactgtgggaggccaaggtgggaggtttgcttgaggccaggagttcaagatgagcctgggcaacaagtgagaccctgtctctacaaaaaataaaataattggccaggcacagtgacatgtgcctgtaatctcagttacttagaagccggaggtgggaggatcccttgaacccaggagttcaaggctgcagtgagccatgatcacgccactgctctccagcctgggcaacagaggctaggaaaataaaaatacattttaaacaaaaataattcaaacactctgataaccaaaatgtcaatgtctgtgcacaagtagacgagtttgagagaaacttgctatggcaggtaattggaggttgttccaattaccaaaccttttcctctaggataagataaaaaaattatccaaaagctctgtgattgatgctgaattctgagagcagactcagagggtgggtgatgggccttaggagggatagaggaaagattgggaagttcccgtccactctgaatttcctgctgatgggttcctcggggtccacccacgggcctcagccctgccaccaactccaaggcctgttctgagaaagggctttgtgagtctgactccccccaagatgggggaacccactgtcaagcacctggtaggagcaggctttgagccctttcaaagatgctgcatacagcaagttccctaagcagcagtgaggtgagtgtcattagcacttcatctcccaggtggcaagggagcttcccaggggataaaaccattcgttaaaggccagcaggacctgggactccacccaggaccccatccaggggagccttgtccttctgtccttctgcaccataagcacctttggcccaggaagcactagacatttggcacagtgggggttccctcacgggctggagaagcagagccctggcaaggctgtgctcacacctcctcccaggtcacacccaggaccaagcacccctgctccagttctgagccttaaaatattgatgagagcacagaggccacctggctgcaatcctccatgttgaagattgggttgcagtgccagctagcagagtgacatggagctgggctttccctgagtgctgagcgtggccccagcccagctctgtcagcgaaaggctgtgtaggtccagcagctttctggaggtctctgagcacaagtgtggtctgacttggactgacccttctaccatacatttggctcagcacccgcagccagagtctagggcccacagggctcagaggaagcaggtgactagaatatccatctgtctggtgggtggggcaggcattcctcctgtcctcatttgcagggattttgagtataatattatgggtaaaaattctggccaggtgcagtggctcacgcctgtaatcccaacactttgagaggccaaggtggatcacctgggtcaggagttcgagaccagcctggccaacacggtgaaaccccgtctctactaaaaatacaaaaattagccaggcatggtggcacatgtctatagttccagctactcgggaggctgaggaaggagaatcacttgaacctaggaggtggaggttgcagtgagccgagatcatgccactgcactccagtctgggcaataaaagcaagactccataacgcgcgcgcgcacacacacacacacacacacacacacacacacacacacaatctttagaggtcatgctgccacccactgtgtgaccttggacagaacatctacctttctaagccactttcctcatccccaaatggagtcctactctacagggctgttggggagattcaccgaaaccagcaaggaaagagctgggtgtagagccaaagccccacaaagggtatctatgcttttcagcttattgttagctggattcccagagcctggcagagagcagcaaatacccattcatcctaagtgccagtggaagcgcaaagcctgcaggagctctggcaggtctaacagggcctggagagttttccattctttgaagctcctggcacattcaaaaattaagaaaaatctaggcgggacacggtggctcacgcctgtaatcccagcactttgggaggctgaggtgggcagatcacctgaggtcaggagcaagactccatctctaaaaaaaaaaaaagaaacatctcgacagggttaccaaaactggggcatgtttgaaatacttaaattgaacaaatcagtgcttttaacacacatgcaaaagtcccattcaagataattttgcaattctcaaggtaatagagggattactttaaaataataatggagccaaccaagcatagtgacacctgcctgtggtccaagctactggggaagctgaggcaggaggatcacttgagcccaggggattgaggctgtagagacatgattgagccactgactccagcctgggtgacagagtgagatactgtcaataataataataataatggtttgtagagcaccttaagtggtatggtgtgacaaacatctttcaggcctgacaacagatctctgtactaatctgattatccttattcagatgtatctaaatctgaggcccttggggcacatgattgcctcctggggctgccatagtagaccctggcaatgacctagtgaccgttcctctactggagatgatcccctgggcccctcagaatgcatttcctgtgtccacatagccggtgttttaagtcaggtgatctttttttttttttttttttttttgagacgaggcctctctcgttgcccaggctggaatgcagtggtgcaatctcggctcactgaaacttcttcctcatgggttcaagtgactggcctgcctcagtctcccaagtagctgggattacaggtgtgcaccacaacgcccggctaattttggtatttttagtagagatggggttttgccatgttggccaggctagtctcgatatctgcccacctcagcttcccaaagtgctggaattacaggcatgagccaccgtcgccagtcttaagtcaggcaatctaagctccctttccaagtttgttgaaaacctgatttgaggttttgtgctttaagcttgcattacatttgtaacacaataaatgcaatttttggcacaataaatgcaaaattgtggcgcagtgactcatacgtgtaatcctagcactttgggaggccgaggcaggtggatcacctgaggtcaggagttcaagacaagcctggccaacagggcgaaaccctgtctctactaaaaatacaaaaattagctgggcatcgtggcaggtgtctataatcccagctatttaacaggctgaggcaggagaatcacttgaacctggagggcagaggttgcagtgagccaagattgcgccactttactccagcctgggcaaaagagccaaactctgtctccaaaaaacaaacaaacaaaatagaaaataaatacaatttttaaaaagaccccagtcatcatgcaggttacactgtggggataacacttctgggctaggagttgggcaacctgggttcaggcaccgcaccccctctgccggctgcacagggcccctctcccctcagtcagccctgggccctgcaggctggacttttgcctggtagctttgggctggccctcccttctgcaggggaccccttgtacagatgggtaagcagaggcacaggggcacaggcaggacagcggctctgctcacgcaggatgccatggccagtcgtgggcctactccatccttgatcctcccctcccaagggcacttgccatccaggcctgaatggcaagaggcccctaaggggcccccagtcctgtcggcaccccctttgagtgactgacagggaggcaggggagctggcagcccccatccccacaccagcttgtggaagctaccagcgatcggtggggccccactggcagcccgtccgtgtagccttggccgggcccccaagcttcttagaatgccatctaagaaggcagagggggatgagcggcggcggggaggaggggcaggccttgggaagatccactgggtcacagggaagcgaaggcggaccctcctcccccagcgctactgcccgggccgaattccaaggccagcggctgcccgctgagaaggaatccggaccaacgggattctggcttccctctggcccctcctggcgagagcggcgccgggaggagggggcctcagaaggggcgggcaggggcggggcccgcggggtaggcggagctcccaggaaaacagcgggcggggcctcgcgcgaggggcggggttggcggcgaggcgtcccaggacccccattcctccctccgccccggggcttctggggagcggcgcagcttgactgccaccgactgcgggcctccctgccctacaagcccccacccccgcccccccttgggacctggcgaggagttgccccgcaaagttggggctggtgcggggttaaggggattacaattttcctaggacttagtgtgctgaagctgcttttgcgattagaatttatatttacaatgctgataacaataaactacccaggctaccgcgccacgtggacgggggtggtggatggaaagggaaacccttggccaccagcagcctgtgataaggccaaggttccctggctggattgctgcctaggatgcctgtggtccctacccccgcccgggaggcaggattgactaatccgaccaagcaaggcctccaggctgggccaagaaccccttcccagtcctctcccaaagtctatgtccttgggctcacgctgtcctctcctgtccttgcctcctgcatctacagacccctgaggccccctcctccttcagagcatgcacgtcgcaaattctcaatgactgtttggaggaatgaataaatgaattgtgaacaaatggtctgaagattccagaggtagcctaatggggccctgctgcttgagttctaatcccagccccaccagttgttggctatttggccctgggcaggtgattattctctctttgcctctgtaccttgcccgtaaaatgaggagaataccagtacctactgcataaggttgttaaaggattaaatgagtgaatagttacaaagagcctggaacagagtgttcaaagaaacacacagccacagtattaaaaaaattaaaaacccatttctctccaggcttctgccatcactctgtgtgacttcaacattctacctgcatgacctatgcagcacctggccgctgttaccttgccaccctcactgacatcttctctgcataggccttccaccatgccctgtactttctccccactagaaatagccctggctctgaaatgtgttttaatcatcccactttgggtccaccagttcctagcctttgagcttaggcctctcctccaggaccctccctggctacgatttcccaacccctctcgaccttccattcactgaccttgccactttcttgcctcttgtctgcacctctccccatccctagtgtggattccatccccttgtgaacgctgccacccgtcctggcagagactcagtacttccactctctgaatgcatttcttcttcctaggcacaccagaagactacatttcctagccccccacccccttgcagtgtctgggaccatgtgactccttaattaggtcacttctctctcctgggaggccctctctgccctctctaagtctaactagtggcaaaggatctaagggaagaaacctggcagagttactagtcccaagaagcctgggtccctgaatcaccacatggaagtctacgcgcccaccacctgaatggactaaggtatgaacagaagtaatacacacccctttagggccaaggaggtgaaacagctggtatgccttcctcacactctcctctgctttcctggtgacctaggaagctgcaggatgaagacaacagcatcacaaggaggaagccaggatccctgtgttaccacaaggaggagagatgcctaaccaagaccgtctgcaaggattttgtgtgagccagaagcagagctgtatggtgttcagccactgagatttgagggctgtttgttacagcagttgacctatcctgactgacacatcacatcattcctttccccaccatgtgtctaacatgctaccaaattgaattttaagtaaattagtacttataaattaagtacaaatgcttttcaaattcacatgaatctttggtaaataaaactggttgtaaaattattgataaatatagaaatgtctgaaattattgataaaatagccttgtgcaagtaagactaatttaagatcattggttcaatgaaaataactgaatcttctgagttgtcggcaaaatgctcatgtgtttaagattcttagataggtgttcacttaatattcagactttaaaaatgattaaccaggatataactttgaccagcctagtatcatagtttttataagtaatcctgggccgggcacgatggctcatgcctgtaatcccagaactttggaaggccaaggtgggtggctcatgaggtcaggagatggagaccatcctggccaacatggtgaaactccatctctactaaaaaaacaaaaaattagccaggcgtggtggcacgtgcctgtagtcccagctactcgggaggctgaggcaggggaatcacttgaacctcggaggtggaggttacattgagccgagatcttgccactgcactccagcctgggtgacagagtgagactccatctcaaaaaaaaaaaaaaaaaaaaagaattgtggaatcctgctgggcatggtgactcatgcctgtaatcccacactttgggaggccaacgcaggtggatcacttgagatcaggaatttgagaccagcctggccaacatggtaaaacctcatctctacccaaagcacacaaaaaattagccaggcatggtggcagacacctgtaatcccagctactcgggaggctgaggcatgagaattgcttgaacctgggaggtggaagttgcagtgagccaagtttgcaccactgcactccagcctgggcaacacagcgagactccatgtcaaaaacaacaaacaaacgaacaaaaagaattgtggaatgctgctcatccataaaatgctaatatctaatgggcatttcaggatttcttgctttctagatttatataaaatgtgccaaagatgtgttcttattgagaaaaagaagaattttgtctaattcagaagttatctgcccagacgcagtggctcatgcctgtaaacccagcactttgggaggccaagttgggtggattacttcaggtcaggagttcaagaccagcctggccaacatggtgaaacacatctctactaaaaataccaaaaaaaaaaagttatctaaaagtcaattcaaattatggagttaaaagtggttcttggccagacgcagtggctcacacctgtaatcccagcactttgggaggccaaggcaggtggatcacctgaggtcaggagtttgagaccagcctgagcaacatggtgaaaccccatctctactaaaaatacaaaaattagctgggtgtggtggtgggcgcctgtaattccagctactcaggaggctgaggcaggagaatctcttgaactggggaggcagaggttgcagtgagctgagatcatgccattgcactccagcctgggcgacaagagtgaaactccatctcaaaaaaaaaaaaaaaaaaaggtccttaaacaaggttgaaagaaaccattaagtaggggagagagagatgtgaaaaaaattatggatacaaagatgtatttttggcaaagaagcttataaagaaaagacaatacctttatatgagaaaggatcttgtatggaaaattattgtcctagagtagaatgactggttatttaagaaagaggaaggccagatgtggtggctcacacctgtaatcccaaaactttgggaggctgaggcagggggatcatttgagctcaggagtttgagaccagcctggggaacatggtgaaacactgtctccccaaaaatataaaacttagctgggcatggcagcatgtgcctgtagtcccaggtactcgggaggctaaggtgggaagattgcttaagccgaggagattcaggctgcagtgagccaagattgtgccactgcatttcatcctgagcaacagaacaagaccctgtctttaaaaaaggaaagaaagaaggaaggaaagaaggaaggaaggaaggagagagagggagagagagaggaaggaaggaaggaaggagggagggagggagggatggagggagggagggagagagagagaaggaaggaaggaaaggaaggaaggaagacagagagaagctgggtgtggtggctcatgcctgtaatcccagcactttgggaggctgaggcgggtggatcacctgaggtcgggagttcgagaccagcctgaccaacatggagaaaccccgtctctactaaaaattcaaaattagctgggcatggtggcacagacctgtaatcccagctactagagaggctgaggcaggagaattgcttgaacctgggaggcggaggttgtggtgagctgagatcacaccattgcactccatcctgggcaacaagagcaaaactccatctcaaaaaaaaaaaaagaaagagaaaatgaagaaagagagaaatagtctaggacaagtcagaaagtccaagcaggacatagatggtttgtgtaagttgtgataagatttgtaaaggggaggccgggcgcggtggctcaggcctgtaatcccagcactttgggaggccgaggcgggcggatcacgaggtcaggagatggagaccatcccggctaaaacggtgaaaccctgtctctactaaaaatacaaaaaattagccgggcgtagtggcgggcgcctgtagtcccagctacttgggaggctgaggcaggagaatggcgtgaacccgggaggcggagcttgcagtgagccgagatcccgccactgcactccagcctgggcgacagagcgagactccgtctcaaaaaaaaaaaaaaaaaaaaaaagatttgtaaaggggaatttacaaaaacaggaattttgtttgtgattaagttagctgcgattaaaaggagattatttctcctttctaaggaatggtcccctatgttaaaagaaggtctgcttaaggtattgatttgctcttaatgaaattataagaaattttgcttttcaattttttgtttgttagttttgagatggagtctcgctctgtcgcccagactggagtgcggtggcgtgatctcagctcaccgcaagctccacctcccagggtcactccagcctgggcaacagagcgagactctgtctaaaaaaaaaaaaaaaaagggatgaatgagtgcctgtccacctccatttcatctggcctagcatatttaactgtctacacgtcttttgattctaagtctcttggccacagcggtcccacttagggacataatatagccagggcaggtagcacaccaccctggcatcgatatggggcacaataaaagcttggccatgatactgcctctggcataccatgaccagaaaaaaaaaaaaaaaaaaaaaaaaaaacacatgcacctgaaaatctagttgaggccatgacaggaagtgggtagggggagggagagtcagccaggcctcactatatttcctcgccttggaattccacacatattttccctgatggtaccaccaattataattcttcttgtcccccttggagggccttagtccctctacaaacaacagtgtctttctcaattcccataactgctccccataatactggtatcacattaaattactactttccccccatcccattcatgcttaaaccaaagcaccccttgaataacacaggtacttaacctttttttttttttttgagacacagtcttgctctgtctcccaggctggagtacagtggcgtgatcctcagcctcccaagtagctgggattacaggcatgtgccaccacacctggctaattttgtatttttagtagagacagggttttgccatgttggccaggctggtctcaaaactcctgacctccagtgatccgcctgccttggcctcccaaagtgctgggattacaggcgtgagccactgcgcccagcggtacttaaccttaacagctcccatcccattccagtctgtgacccacagtggatatctgtggctatatggatgcccactaaatcaatcagcctataaacaactcattcctcatttgagaccacgggtaccaatgtgttgataacatttggctcaaaggtcaacatatagtaagacaggtgaagccggccgggcgcggtggctcacgcctgtaatcccagcactttgagaggcctaggcgggcggatcacgaggtcaggagatcaagaccatcctggctaacatggtgaaaccctgtctctactaaaaatacaaaaatagagtcgggcgtggtggcaggcgcctgtagtcccagctactcgggaggttgagacaggagaatggcgtgaacccaggaggcggagcttgcagtgagccgagatcgtgccactgcactccagcctgggcgacacagcaagactctgtctcaaaacaaaaacaaaaacaaaaacaaaacaaaacaaaaaaaagacaggcgaagccttctaatatacaattatacaacatcacttgcccaagcactaagtgagcaattggccttctgttgtctggggtcagggctgctgtgggcttgttggccccatggggaggatttgcctaacatgaggcaactcttcaaaactttacttttcactctacataccttcttataaaatgggagatactttagataaattgagactctctcgattctatagcagatatagttatggataatagattggcattagactatttgttggctgaacaatgacaggtatatgctgtgattaataaaacctgctgtacctatgtaaacaactcaggtcaagtagaggaagataccgacaaaatatatgaacaaggctgggcacagtggctcacgtccagtgcttttggaggccaaggagggtgaatcacttgaggtcaggagttggagaccagcctggccaacatggtgaaaccccatctctaggaaaaatacaaaaattagccaggcatggaggcacatgtctgtaatcccagctactccggaggctgagggaggagaattgtgtgaacctgggaggcagaggctgcagtaggccaagattatgccactgcattccagcctgggagacagagtgggaccctgtctccaaaaaaaaaaagaaaaagaaaaaaaaaaaagggccaggcatgttggctcacgcctgtaatcccagcactttgggaggctgaggcgggtggatcacaaggtcaagagatcgaaatcatcctggccaacatggtgaaaccctgcctctactaaaaatacaaaaattagctgggtgtggtggtgcacacctgtagtctcagctactcaggaggctgaggcaggagaatcgcttgaagccaggaggtagaggttgcagtgagccaagattgcgccattgtactccagcctggcaacagagcaagactgcgtctcaaaaaaaaaaaaaaaaaaaaaaaaaaaaaagaacaagccaagtggctacatggtgttcacaaccccaatacccagactactatgcggaattccataaggggtttctaccggcagtgacttggtttttacctaggacctttaatagctctcttgttactattgatctttgtttggcctttacttatttaacctcttagtaaagttcgtgtcttctagattataacaattccatgtggaaatgatgcttgcactaggtttctgacccatcctgtcttctagcctggaaaataaagatctcctgcctttggggtccttagatcaggcaaccagagattttcactcctccaacaccaggcagagcctatgcccataagatcagcaggaagcagttgtagagggtggacctctgcccttctaccactttttaagattaaggaggagtctgacgcctgtcatcccagcactttgggaggccgaagcaggcggatcacctgaggtcaggagttggagagtagcctggccaacatggtgaagccccgtctctactcaaagtacaaaaaattatccatgcagtagtggcgtgcgcctttaatcccagctactcaggaggctgaggcagaggttgcagtgagccaacatggtgccactgcactccagcctgggtgagagagcaagactctgtccaaaaaaaaaaaaaaaaggtctggtgcgatggctcacgcctgtaatcccagcactttgggaggccgagacgggtggatcacgaggtcaggagatacagaccatcctggctaacacggtaaaaccccatctctactaaaaatacaaaaaaaattagccaggcatggtggtgggcgcctgtagtcccagctacttgggaggctgaggcaggacaaaggcatgaacctgggaggcggagcttgcagtgagctgagatcacgccactgcactccagcctgggcgacagagcgagactcgggctcaaaacaaaacaaaacaaaacaaagattgaagaggactctacagtctctccgggaaggaataaggttagagatcagcaggacttgttttctgagcaccagtcacaagaccttgctgaacaaaacatgatctgatcaaaagaggatgcaggaaagacattggccaaaactagctaaaaccaacacggtgaccaaagcaacctctagatgccctcattgttcattgtgcactaattataatgccttcgcatgctgaaagacactcccgccagcaccgtgacagtttacaaatactgtggccactcccagaagctaccttatacagtttaaaaagggtagaggcccagtgtggtgtttcacgcctgtaatcccagcactttgggaggcgggtggatcacgaggtcaggagatcgagaccatcctggctaacgtggtgaaaccccgtctctacgaaaaatacaaaaattagccgggcgtggtggcaggcacctgtagtcccagttacttaggaggctgaggcaggagaatcgcttgaacccgggaggcggaggtttccgtgagccgagatggcgccactgcactccagcctgggagacagagcaagactctgtctcaaattaaaaaaaaaaaaaaaaaagccaggctggctcacgcctgtaatcccagcactttgggaggccgaggtgggacagatcacctgaggtcaccctgaccaacatggtgaaactccgtctctactaaaatacaaaattagccaggcttggtggctcatcgcctgtgatcccagctactcgggaggctgaggcaggagaatcacttgaacccgggaggcggaggtttccatgagccaagatcatgccactgtactccagcctgggcaacaagagcgaaactccatctcaaaagaaagaaagaaagaatgaatgaatgaataaataaataaaataaaaattaaaaaaaggtagaaacccttgcttccagaaactccccactccttttgcagaaaactcgtgaatagcctgtcctttatttagcatataatgaaggaatagacataaatatagctggccagcaatccacgagggctgccgctactgctctacggagcagccattttcctgcactgttgctctaataaacttgtgtttgctttgctctgtcttgtttgctcacccttgaattcttttctctgcaaagccaagagctctcccagtctgagccccaatcatcaaagatgattttgagggcttcagtatttaaaggggaaaagcaggctggaggggaaggagggaggggatggtcacattattaaatccgtatgttggaagagaaaaggagcagggaggggaatagtgacatattcatctagtgcttctacatcggcattttacacaagataaggtgaatgcagagtgtagatatttaaccttttatccgtggctctctgcttaggaacaaaaggagaagcagcttcttgcctgactcagctttcagcttaatttttttcttttggcagagtgaattgggattccaagattttatttgcctttcccatcatgcgattggataccacaaagcagtgaagaacagtgagtgcccatgtacttgacaatgaaggggaatcttccagacatacatgaagcgaaggaaggcaggcaaaagagtgtgcttgtgtgatactgcctatttggggctctagaagaggcaaaactaatctatgggagtttgaggataatgttcaggataatggtttacttttggcaagtgttgtctgagaagaggcacttgggagccttctgggggctggaaatgttctgtatcttgagctaggtggtgggtacacaggcatatggcttgtcaaaaataattgagttagccgggcacagtagctcatgcctgtaatcctagcattttgggaggccaaggtgggtggatcacctgaggtcaggagtttaagaccagcctggccaacatggtgaaacccctgtctctactaaaaaaaatacataagattagctgagcatggtggtgggcacccgtaatcccagctactcgggagtctgaggcaggagaatcgcttgaacacgggaggcagagtttgcagagagccaagatcacgcaactgcactctagcctggaggacagagcaagattccatcttaaaaaaaaaaaaaaagaaggccaggagtggtggctcacacctgtaatcccagcactttgggaggccaaggtaggtggatcaccagaggttgggagttagagaccagcctgaccaacatggagaaaccctgtctctactaaaaatacaaaattagccgggcatggtggcacatgcctgtaatcccagctactcgggaggctgaggtaggagaatcgcttgaacccgggaggcagagtttgcggtgagccaagatcgcgcaattgcactccagcctgggtgacgagcgaaactccatctcaaaagaaaaaaaaaaagaaataaagacataaaagatacttggggctgggcacggtggctcatggctttaattccagcactttgggaagctgaggtggctagatcacttgaggtcaggagttcaagaccagcctggccagcatggtgaaaccctactaaaagtataaaaattagccaggaatgatggcaggcgctaatcccagctactcaggaggctgaggcaggagaatcgcttgaacctgggaagtgaaggttgcagtgaactatgattgcgccactgcactccagcctaagcgacaagagcgaaactctgtctcaaaaaaaaaaaaaaaaaaagttgagtcatgttgtgaatgtatttaacaccactgagccgtacacttaaaaatggtgaagatgttagattttatgttatatctattttaccaccatacaaaaaaattgagttataccttaaggtttgtggactttattacatgtcagttgcacttcaactgaaacatttagcacgatcgttgcccctggctcctgagtaatttttttcatttttcagacatgaggtctcgctctgtcgcccaggctggagtgcagtggcacaatcatagctcactgcagcctcgaactcctgggctcaagtgatattcccacatcagcctcccaagtagctgggatgtcaggcataataagctactgcgcccgtccccccaagtcattgcaaatgttctttgaaaataccaccttcaggccaggcgcagttgctcacgcctttaatcccagcactttgggaggccaaggcaggcagataacttgaggtcaggagttcaagaccagcctggccaacacggtgaaatcctgtctctactaaaaatacaaaaatgggctgggcatggtggtgcatgcctgtagtcccagctattcaggaggctgaagcaggagaattgcttgaacccgggaggtggaggttgcagtgagccgagattgcacccgcagcctggatgacaaagcaagactccatctgaaaaaaaaaaaaaaaaaagaaaataccaccttcagtggccacatattttcccatccacggatgtgtcctggtaccttcattcactctcaaatctttccccagaattgtgagaaccacagccccatgtcacagccccaaggttgcagacaaggtcccgacccacgttaagacgcaaaataatttattggaaggtttttcttagacccctgggaaggctaggaaacctggcttggaaagaaggaggagctcaaggaggcaggaagctgccccacagcctgggttaccccaggaataggctggtctaggggccgctgtaaccactgctgacactgtggatgtcaccatcagggacagtgccactctgggacgctgcagccatagccactgggaagaggtcccagtgggcccggattctttgtggaggaatctataggcctgagctctagaggctgggaaatggaggggcaagtctctggtccccatgctcaacaagaccccctcagtggggaattcctcattgcagaaggggcaccagatgcagggcagctaaacaagcagccagggattcctaccccgagaaatgtcctctaagacaataacagccagtatttgttgagctctcactgggtgccaggcccctgtgccaaacttcctacatggattatcacaaagaatactcacattagccctgtggggtgggggttattattatcttgattttgcagacaaggaggcaggcacagagcaatttggcaacctgcccaggaccacacgcatgaggagcaggaggcggcattgcattgggggcacctgtgtgccaggtcagtgcagggcactttgcagtcctcttagggctgagggccttggacactcagcaccattttccctgctctgtggctgcagggggctgcaggggctggaagcctgacagccacgtttccttgaagcccctgcagcagggttctgggttacagcctgtcagtcacgggcatttgcctgacacctggaaggctgtggggaggtgcagtggcaggcaggggtgggctttgccagatgtgacactttgccagtgacttctgggggtctcctggggctgaccagcccccctccgagtggtgcatgctcctgcaattcctccagtcctagtttcttttctttctttttcttaagacagggtctctttctgtcacccaggctggagtgcagtggtgcaatcatggctcattgcagccttgacctcccaggctcaagcagtcctcctgccccagcctcttgagtagctgggaccacaggcgtgcaccaccatgccaggctacaaatcctaacttctggaccaggtgtggctgcccctcagctctttggaaggttttgcaagcctcaaattccccgtgttcagtcctttcctgcttgaaatgccattttcccaactgaaccttgatgaggcagaggtgttaaggcaaagcagctgggcctataggcctgagctctagaggctggggaatggaggaacaaggctctggtccccgcgctcaacaagaccccctcaatggggaattccacattgcagaagggacaccaggtgtggggcagctcaacaagcagccagggcctcctaccccaagaaatgtccttctaggataatagccagcatttgccaagcactcaccggtgccaagcccctgtgccaagcactcaccgggtgccaggccccaggaggctgaggcaggactggctttagaacaggaaagctgggggtgcgagcccggctctgccagttctgtgggtttgtggttttttggtcgcttcatgtgcctgagtctcattttcctgtttcctcatttggaacaggcagtggtggcgtctctcatggggacgtggagataaaccagggcgacatcggggacacacaagcccagtgcctgcggcgatggccgatgaggcgctctttccatttcctggtagcagatgaggaaagtgaggctcaaagaggtgatgtcatttgccccaaatcacacagttgggaggtggtggggtgcgaattcaaacccaggagtgtgaagcttccagctcgtctgtttctccctggctgtgggtcagtgccctgtgggaggccaggatgccggtcagggactggcatggcagggtgaggggagcagggtgggccagcctgcctcccctccctctcctggggctgctgccctgtggagtaggggactgccatggccctcacctgtccaccttgtctccttgcctgggccttgtcagccctgtgcactccacagggcagggacagggcctgctgttgacagaagttcagaacaaggcagtgcttggccctgggtcctgcgcagatcagtgctggggctggcctggggcccgagctcaagcctccgaatccccttgcccaggctggactcttgctgcaccggggcaggttggcagaggcctggaggttttctctgggctgcaggttgaggcacctgggcttgcagacgcacgtctggcggtccagcttcctccctggcagcctctctcctgcgacagcaatatggtggtctgcagcttcaggccagctccattgctgcccatgaggctaccccagtggagagaggtcaccttgcctcagggtcccagctgaagtccccaggctgcatctcattggccaggcttggtgatatgttcatccctgaccagtcgcagtgcccggggggtgcgccctctcataggccagccatggagtaggctggggtcagaaaaggcctctcctccctgagccacatgaactgagaatggggaggtgacctttccaaagagggggtaatggactctaggagtcagaagtagtgaatgacccggacggggaaacgcaggccccactgtcgccagccctgctgatggtggccatcctttcttcctcaccttggcagcaggagctggatggagtctggggaggtggcaggtacaggctggagctcagagtgtgagagacagttgaggatggaatgttctcttggagaagcgagaataatgtctcctccccttctccaaacagcaagtgcccggcccagcctctgtctcaggaaactctctaacagccaagatcagggccttatggagagctgacccaaggccaggcactatgttggacacatctgatgagtcacttcacttcagccttgccaaagcttcatgagcacccatttcacagatgaagaaacggaggctcagaaagacaaacgtttcagccaataagtggctgaatctatgctcaaacctaggtctgtgtgatcccagaccctgaattctacaagtccaccaaaaactcctctttatcttcttttattttttatgtatttatttatttttagacagagtctcactctgtcgctcaggctggagtgcagtggcgcgatctcggctcctctccgccccatgggttcaagtgattctcttgcctcagcctccctagtagctgggactaaagacgcacgccaccacaccccgctaatttttgtatttttagtagagacggggtttcaccatgttggccaggaggtctcactctcctgacctcgtgatccacccacctcggcctctcaaagtgttgggaatacaggcgtgagccaccgcaccagcctatcttcttttaaaaacatcatcagtccaccctgggtaatatggcaaaatcccatctctacagaaaatacaaaaattacccaggcatggtggcacatgcctgtggtcccagcttcttgggaagctgaggtgggacgatcacctgagccctggaggttgaggctccaatgagccatggtcatgccactgcaccccagcctaggcaacagaatgagaccctgactcacgatacataaataactaaaaatagccaggcgggctgggcgcggtggctcatgcctgtaatcccagcactctgggaggccgaggcaggcagatcacgaggtcaggagatcgagaccaccctggctaacacggtgaaaccccgtctctactaaaaatacaaaaaaattagccaggcgtggtgacgggcgcctgtagtcccagccatttgggaggctgaggcaggagaatggcgtgaacccgggaggcagagcttgcagtgagccaagattgtaccactgcactccagcctgggcgacagagaaagactccgtctcaaaaaaaaaaaaaataaaataaaataaaataaaataaaaacacataaaacatcatcagtgtcttgttaaagtagtgctgttctagttgtaaacgagttagtgtgaggttgtgggccatgtctgaggcctcagctctcagcccaggaaataaggctgttgtgagtgagtaaggtgggggtgaaggatgtgggaggggggctctacttccaaagttgctgaggcagtgttgaaggccgcaggacacttcctcaccactgtggcccaactcttctttctccctcaaaacccagctcgaaggacacttcctcccagaagtcttctctgctgtgcctataaccctcccctgaccccaggaagacacacacacacacacacacacacacacaacttctctgtgtactccatcccctacgttgtactcatcaaagccccaaccatagtgtgtgtgtgtggtgtgtatggtgtgtatggtgtgtatggtgtgtgtgtgtgtgtgtgtgtgtgtgtgtgtgtctgtctgtctgtctcctcggtcagactgggacaacctgagggcaaggagagggaattccctgatgcccaaggtgtgccccgtgtagatcatggtacagagtggaggctcagcaaacagagcataaatgaatgagtgagtgaatgaatgcatggaatcttggggtgagtttccctgaagacagccccagggtgctgtggctgtaggagctggaccgtctagtgccttggtctgggggtggctgaagctggaggagggaaagaggccagtcctttgcagcttctggaggccagagtccaaggtcagcttctctcaacaggacccctctgaacccggctgacaccacggcctttggaagccatgtggtcagtaacacgctgtcacccttactgcagtctgttcacctgacctaatgactgggaacctcaggtctgtgactcaatgcccagaatgctgtctggtatgggggtatgggtcacacctggctcatctccaggacagccctgttctgcgtgtctgccagccaaggggtcacgtgctaacctggctgccccactgggggtgggaggggcagcttcaggatggggccgcatcaggccccatctccctaccaggcccgtcagtgggcaccctgagcctctctctctcattccttcttttgagcctgcagcactactccccgaccaaagcacactttcccttctcgtctggaggagagatggggcctcgtgccagctctgcccctgcctgacacacacgcttggcccgtcactgagcctcagtttccctctctgtatttcttggctgtgcaaaggcagtcgggggaggctggccctttaagctggatgaggctggtattttgtgtttttttttgagacgaagtctcactctgtcacccaggctggagtgcaatggcgcgatcttggctcactgcaacctccgcctcctgggttcaagtgattctcctgcctcagcctcccaagtagctgggattacaggtgcccaccaccacactcagcaaattttttgtatttttagtagagacggggttttgccatgttgggcaggctggtcttgaactcctgacctcaggtgatccgcccgccttgggaggctgggtttttgagctttgtgctgttggggcccagccctcagggccgcgtgggaacccccggggcggggtgttctataccaggaagtaggcagagggccagcccgaggacagttcgtttcttgccagtcccctgacctctcttggcacacagcctgtggcagcagcaggttgaagccagacgctgctcagacctcacaccacgtcgtttgcccaacccagagaaagctctgtccccggcttctggctccttctctgccaggactcactgggtgtgatgagttggtcttggggcactgtctgggcacagcctgtttgcccaacatggcctcctgggctccatgcttccgcaggtgggaggggtctggactggcccaggggctctgacagcggctggcaacctgaggttttgacttcagggtgacctgaatcctgccgcattatggaggctggagtctctgggggctgctttcccagagaagaagctccttccccatcagcctgacattggctccaaggactccatgtggctggagggctcagggctaaggggagggaagccccgggatggcagtgaggggtgagggaagatttgggaggtgacatctacaaagagacctgagcgggtggggcaaagagggggtcccaggcagagggagaagcaagtgcaaagaccttcataacccaggggagcgctgagaccaccgaccagcagcacccccacttcttcaagccaccactcctcagggcctcccaggggtccccagcctggagcaccccatgtggtagagctggtaggctgggggacactggggactgctgtcccacttggagcctcgggctactccgcccaggagcagcgatgtggaaccttgttggattttcatgttcccaaacatccaggagacacacagttgtgagtttccagccaggcgatctctaaggccagagcagcccttgtgggtgtcagtgaggaagggcagaaagactctggcctcaagctcagctccctgctgcagggagttgaacgcccctttggtgagtggctctagctaaacaaacacgtgttatcatctgtcaatagcggccacctccttgctggctgggctgctgctggctcaaagcccagagcagcccttccggggcactgcctgccacagccaacagtcagggaagggcagctactgccctgggttcaagcccgggctacccctgctcctgctcactgtgtgtccccaagcaagtcactgtccctgcctctctgtacagtgggaggcctggatctctctgctctgggaagacacccagccctggaatggttgggccacacttggggctgggggccaggaggaagttggagggctgggctggggctggggctgattagttgaagccagtagaaaagtacaggctttgctattagattccaggaaataacaaaagctgctaacagttaccgaatgcttaccacgcacccgacgtggtgctcacgcatcttttgctgttttatttcatccttagtgagttgggtactattatcatctccattttacagagcagaaactaaggctcagataggagacgctgcaaaatcaggaggtggtgaagacagaatgtgcccctagggtgctgatcagggccctcacctagaggcagatgcccccatctcctaaggtcaatggtcctcagctatcatcccttttttttgttttttgaggtggagtctcgctttgtcgcccaggctggagtacacgatctgggctcactgtaagctccgcctgccgggttcacaccattctcttgcctcagcctcctgaggagctgggactacaggcggccgccaccacgcctggcaaattttttgtatttttagtagagacagggtttcaccatgttagccaggatggtctcgatctcctacccgcctcagcctcccaaagtgctgggattataggcatgagccaccacgtccggccagctatcatccccttttaaactttctggactggccacgctgaacttctcaccctcctttccataagacaccctgtccttccatgtctccaggactttgcaggtgtccaccgcctctgccctttgggcttatgaactcctattcatctctcaggacccttcttaattttacctcctccatgaagcctgctttgcttggttccccagcagaaacagggggcactctccttggtcctcctgccacgcttcttccacacatgcatcctggcaattaccacattttactgatgttcgtgtgtgtttccctggagggaaaggagtgggtttcaatcacccccatatcccctgtgccttttgagtgaccagccgttattcggcactcaaatagggaaggctgtcaggggagcagctgactgcagagagactgccttggaaggaggagaggcccgggggtggagcggaggtttcgggtaaacagaggcggcctgactgacagaggggcatcagccaggggaaaatagaaccgggatccaggatcgtctgagtacgcagctgagctggagaaggttgtaatgaaggcagtttgagcaggtgtcagctgaggagggcagaggttaggggcagagcagggcgcatgaggtgtctggggtgcacccacagactgttgaggcaggacacgggtaccaactgacttgggtgccagacccatgtgaagggcacgatgggcactctcctgctgaatcctcaacaaacccagagcgctttcactccctctgctttacaagttacaaatctgaggtttgggaacaagtgaggcagggcaggtgccccccaaccttgccccaggccaagtgggtgcctgagtcaactctggtccacttggatgacagtcatgtgccaccacacctagctcagcctccccagcttgccgcttaccgcagaagaaaaacatggtttgactagcaagaggaggaaattagagttttgtgtatagaagagtcactctgggccgggcgcagtggctcacacctgtaatcccagcactttgagaggccaaggtgggtggatcacttgaggtcaggagtttgagaccagcctggccaacacggtgaaaccctttctctactaaaagcataaaaattagccgggtgtagtggcaggcgcctgtaattccagctactcgggaggttgaggcatgagaatcgcttgaacccaggaggtggaggttgcaatgagccaagatcgtgccactgcactccagcctgggcgacagagtgagactctgtctcaaaaaaaaaaaaaaaaaaaaaaaggaaaaagaagagtcactctggagaacagctaagtccaagactcctggcctgtagcttccagtcacgttctatcagtgctcaacttgccatccccactgaggctggtgtgatgaaatcaaaattacctgaccccggcctgctgctcagggagtaaccacactcatgaagagtggcaaaagtgtaacgtgctttgcagacgtgcttatgagatgtaaattgcctttcggtaaatagaaccctgcttcccattcatgtaattatagcttccagcctctgccccatgagagaaaacacttgtcctgaggggaatcacagtaataatttagagaataacacaagaaaccttctcctcatcaaatgcagttattcctttgccccggatgacatttctgtcaagtcgctattaaaatcaccaagtccaggctgggcatgctggctcacacctgtaatcccagaagtttgagaggccgaggtgggtggatcacttgaggtcacgagttcaagaccagcctagggaacatggtgagaccccggcccccacccccatctctactaaaaatacagaaaattagctgggtgtggtggtctgtgcctgtggtcccagctacttgggagactgaggtgggaggatcgcctgaacccaggaggtcgaggctgcagtgagccaagatttcaccactgcactccaatcttgggcaacaaagcaagaccttgtctcaaaaaaaaaaaaaaaagaaagaaagacaggaaaaacaaaacaaaacgaaaaaaacactaatcgtcaagtccagcagcctgcctggctggaggaaacctcggacttcctttgctgtctctaggcatgctccgctcccctccagtttgactcaccctttcagataacaagaggcctgcccccatggagtgcctgagggccagcaaacacctgtggcttcctaggagcccgtgctttgggcagtggcacctctcccacttttcaagctccctaagcatatttgacagtgggcgtggatcaccccacttatctggggcataatctttagacagacttctcctggccccacataactgcatggaaagtgggtagaaagcaatgattcctatttttcgcccatagggattcttttttttttttttttttttttgagacagagtctcgctctgtcaccaggctggagtgcagtggcgtgatctcggctcactggaacctccgcctcccaagttcaagcgattctcctgcctcagcctcccaagtagctgggactgcaggcgtgtgccaccacacctggctaattttttgtatttttagtagagacagggtttcaccgtgttagccagtttggtctcgatctcctgacctcatgatctgcctgcctcggcctcccaaagtgctgggattacaggcgtgagccaccgtgcccggccttttttttcttttaaagagatggatcggtcttgctatgttgcccaggctggactcctgggctcaagtgatcctccagcctcagcctcccaagtagacccacaggaatgccgaggagacagagactttcagaatcaccctggcaaaggtggggctgcgcagctggggctgggggtctctggaacactggcagctctgtggtccttacctgtgctctctagatatttgagatgagcctgggcaatatagggagaagcccgtttctacaaaaagtaaaaaaattagtggggcatggtggtgcgcacctgttgttccagctactcagcaggaggctgaggcaggaggattgctcaggtctgggaggtcaaggctacagtgaggcatggtcacaccaccgtactccagcccgggtgacagagtgaaaccctgtctcaaaaaaacaaaacaaaaacaaaaaacaagctggtgccttggagcctggggttaatgtctgcctctgtcacttgccaccagctgcacaatctcaggcaggccgatttccttgtttattaaggccccagagcaccaccaccctgagtggggtattccccgttcgtttccccacaggcccagtttctgtatggctccctgtatggagtgtggtagccccccaaggcatgttgctttgttccctgagccccagaagcctgcactcactggaagtccactggaggcccaccatgaaggttgtctgccatcctcttgggtgacccatgccatgatttctcacaactgtgaccactccactaccagggtcccgactaggaccttgttctcacaggaaagtgtggcccctccagagctctgagcgcctgttctccgcctgccctccacacttgcttactgctccaatgcttggcagtcctctgcccacagggagcctccaggattcaaacacctccaccttcacctgtctagtgacccactcagctcacagacttgccttttcttccctaacctgcaggtatgcacggcttctcatgcaaccccttctcctgccaacctgaaccctagggcccccagccctgctgtcttctgtggtctccacctgggtaaaggcccacgtgtgcctgagaggctcacacctgtgcagggaagtgctggccaccagcctgggctcaggacactgacctggtaccttgaaagtgatgagtagatatttctttaatgaatgataactaggtttctacagtcagcatgctttcccattctcaatttcaaacctccttcttactcctcaaacctcctggccctcctgtcttcactctcatctgcctcctacttaccagacaagagaaaacctcactctggactggctccctcaccacatcccaaatcctcttttcctcctggaaggaagacggatctactctctgaagacccccctgaggccctactccaagtaactccttcactttctttctcagaacacacttactatgcaagctccccgcctccaagattcaacttgggtctcctattaatgaaatgaacctcctcccttcccagtggtcatcctctctcgttcctccttcacaaactttgcctccaccctctcaacccatccggctcttccttgaagcactgacctaagctcagctctccgaagtcgaggaccaacagcgggggagcagcctttcctgccgcccccaggcctcagtgagggtgggtgcaggggctgccctcagccagctccctaggctagctcactgctgtggtctgagcatggccccaggttcatgctggaaactcagcccccagtgcaacagtgtgttgagaagtggggtctaagaggcaattcggtcatgaaggccctgcctcatgaatgaatggattaatgccattatcgtgggagtgggctcccaatagaagtcaagccccttcccctctctgcagcacgggacgatgcagcagaaaggtcttcctcgccagaatcggcccctccatcttgaacttcccagcctccagaaccatgaaccaaacaaacgtctattggttctaaattgcccagtctgtgatattgtgatagcagtacaaagagaccaagacacccactctcatggctttgattttaccccacattgaagattcaaatcttgttccctgctccaaaccccaagaacgtactaggtgctcaaacaacacggaagtgcaccttcactcctgccacactgggccccagctgctcagggcctcacactggttccagcggtctggtgtgcctgagcaggcccagcagcgctctgcctcccttcagccagagtagactcaacaaggtgggctgccccaaaaagacctaagtcactgtttactgcaagtcagctgaaaaccccacaaacctggcaaggaggacgcgggatctggcaacagatctggctttttcagaacattaccaaagcaatctctacgggcctgcgtctgtcttctgtcctccagattagcagctttacaacagtttccatgaatatgtgttaagcttaacggcctgggagaaaataagtggcagatggtggaggcagtgttagtgagcgaccccctttcccagtcttggccattcacacacactgcccctagcaatccctggtacccttttggaagaatccaaatttacttttcagccgggcatggtggctcatgcctgtaatcccagcactttgggaggctgagatgggcagatcacttgaggtcaggagttcaagaccagcctggccaacatggttaaactccatctctaccaaaaatacaaaaattaacccagcatggtggcgggcgcctgtagtcccagctacttgggaggctgatgcaggagaaccgcttgaacctgggaggtggaggttgcagtgagtcaagattgtgccactgcacttcagcctgggcaacagagtgagactccgtctctaaatcaataaatttccttttcccctgggctctatcattagcaaacacaagtaatgcccatgtgctctaggacatcagggagggagtaaacctcaccttcctttgcatgcgagggtcacacgtgccatagtcacagggagtgccctggagctggcaacttgcttgtactctgctctgggtgcgactgggttctgcagcagagtacgcaacggtgcagcaggtcagtgacagaaagttgacatttgagaaacgagtcacacaagggctcccggcaagttagctaccattggctattggaagagtagagagaaaacctgagatgctgaacaagactcctaagtacttaacagacatgccacgcttagcctttttctatactgggaacccaagtttgggtggatacttcaatcaattaggaaaaatcaataatcaatacttgactagtcccgtgtgtgcagcactcacccagattatcctcatgagtgaatgcagctcaaccagaaacttaactgatgacgggaccaggcgtccacactgatctccggcacagaatgatgctgggtgccaggaaagagatgtggagattaagcagcttgctcagggatactcagatgttgcaggtttcctctctcctgtacagtcatatttcaacagtaaatgggtgaaaaaaggacccaggccagtcatgagtatgctaactttgaccaatacggagaggggggaaaaaaacaactccaagtaatcaggaactattaatgcatttgggttgcaaaagccttcgatgttattgtgctccatgttgagggcaaacatttcttgggttcaaggactaggaaggtatgtagtttagtctccctactaaaagaagaatgtatgtttaccctctcttctcttaaaaatgagtggcaccagacacaagagaccagggcccagagaactcaacactcacaggtattgaaaagctttagaaattgattttacaaattgttttacatgaaaattttgtggagaaagtcaccactttgatcttttttttttcttttcagatacagtgaacaccggccaaattgttttaatttccgaatttattaaaatgattaacctcaatactgcaagtgcatgtacaaaatatttgtaaaaaatgtttttaatgaaacgttaaagaacttacctcaaatgctgaaaaagtcctttttcattctttcagtacaaggaatacattgtatctcaaaagtattacaactcagcaaaaacaatttataacagtaatttgaaaatgattgaaaattgaatactttacatatatttctatgatcatctcctaattcttacaatgccaaaatcttaaccaatcattgcataagctcaagctaagagttttattgaatgcaacctcttctaaactggtcaacggtgtgtggctgtcaccattccacacggtgaagttctacagcagatccggaacagttccgaggcccctacctttaccaacggaaattaggtttccctagaaggcatcaacagtggctgctgagtgcttgtgcataccgactcctgagaggcagtgatttactaccaaatgtcactgctttgagacccatgggaaggttggcctccaaagaggaggccatgataaaattaaaacatcaaaaataagttactaaaattcagctgaaaaatgaaaatgggaaatgtgttttgtcactttttaagatcgaaattcccaaaatagctatcgttggtattcaaataaggtttaagatttagtctctgaacctcttcaaaacaccccaaactaaggtgggaatacaagaggtgacccgctgccctccagcacctccagacacagggtctaccttcatcttcctcagtggcaggggttcacatttctatgcagggaccccatgagggctggacgtgctctgcaaagtgctccgggtgcctcggacaggtgctcctgagaggctgtgtgggctgccctacttcactgttgaagacctccagacgcagtgaacgggggtatgggtgggtgtggaagaaggtctaccacatgctttccaaacgcctgaggagttcgactgcaccacaacaaacaaggatgagactatgtaagactgcagaagtagttccttagagaaccaggagaaaacaatctactttctaaaaatgttcatgagtcttaatttctatttggaacctatgggcaatcaacagtcttaaggagcgtcattgaaacaatatccccccaaacctggaaactagtaggaatcaattagtagtaacagtaagcattgagattttctccactggacttttcatgaccttcagattccttttcatatttcaagacatgggctactttcctatagacactatacaaatcccctgaattgatttttacttaggaacactgtatatcagaaagtacaggtacacatttcccagaaataaagagacctactggtgtcaaacacctgttacagatttatattcccaaattctctgtccaatgatttgcaaaataatccagagaaatgaaaagaacctggtattgaacataaagtagtaataaaaatttgctcattaagttaattaaaattaatttctcaaagtgcttcaaaaaacaaattaaatctgactcctttttgtttaactgataatatagtcaaaaaaatctttgatgttttcataataaactaacataaactaacataagccaagaactcccactgatgcagtgcttaaaactatatatttataatttcctattttattggcatgaatatttctaaacttaaaaaccttcctggtaagttcttttaatttcttatgacaaaaatttctcacaacacacaaatatttacaacatatacattgttttcagttctttacattgaatctcaaagacaaactttttttataggttaccacagaacaaaagctgtgactcatgtttttatttcataaactattataagttaaagtgaatagatttttttaatattccttgtagcattttacaagtgcaacagaaaacttgaagaaccaaattaagatagctgtagttcattagataaatgttgcttgttgtcatcacgttgttcacagcaaatttttgaaaaaataagcaccaatcattcttgcaaagaacaattttatctaaaaggattgaaaagagttaaatacaaggtttttaatttacatgacaagcaataaatacgctgtatcgaacctcatcccacacactgctaccctcgtacatataatgaactgaaaagtgagctgtcacgtatgtcattttttttttttttttaagaaaccaatctgactcccaaccaatggtttgcgatattaacaaaggccacaaacagtacacctgggccagcaaacagtgtgaaactgacaaaactccaagggggaaacatctagcaaataaatcaaaaagccaaagatcattgctggtgatattagcatactagaaacccttaatatgctgctactatgatttgttttaaattattgtttagtcatatattaaagagccagctgatgctcttacagttaaaaaaactgtgtagccacattactgttttcaacgtcctgtgtggaaagttgctatcactgtacaattttgcttgagcctttattttacaacagggctttacctctaactcagaattgcacgtaagaaggctatttaaaaagtacgataaaaatttgcacaaatcagacttaagaattgagtcagtatgctgtacactttctacaatagtatgctgataagtgaagggacaatagaagtgctgccactaaactttcagttgaggaataattgactggaattttttatttctttaaagtagttatcccaggtcaagttaagaccaagagcttaggcattaagccttaaagactgatcttctcttctccttgaagaaatgtcaatatctatagagtcttttccaactattaacctcaagcgcttagctggaggaagaggaataaaatcgtcttcaaagtcatcatcatagtcatcctcctcttcatcgccctcagaagaggaggaatcatctgtactttcttcctcatactgactatagtcatccacctccattcgagactccaagagagaaagaggatcactgcagcacaccccattttcatgaagcccctctgtataagaccccctattttcctcatctcgttttagctggatttttaattttgtagaactactgcctgatcctgagttaaatccattattaagctttgctacatagagattgttatcgttgtcatggtctttgcttaacttgatgcttattttggaagagttcattccatcattctcttggtcatttgttttgctgctgctatcatgacgcctacgaagagtcaatttgggaatcccagagttattttctaggattaactgtgcatcataccttgtgattcgcctcttctttttactttttgcagttctaaagctgtcttttgttttgaagctatctgatgtcacaactgaacaaccgacgggtgaaggagcacagtctgtgtagctcacaggcacgcccacagtgccactgtgctcaccctggtcagaatggggacccatcaaatctggtaccgcgtcgtcttttccaggagaatcgtgcactggagtagattcctctatttttgcaaactgtttcacaagttttccttgtcgtgacttctttttggacatgcctgtgtcactcttatgacactttgcctcccctttttgtgcagtctcatgagccagttcttcctcctgcagcacaggagctggctgcagctgttcaccactgtcggggcaaggttccgtcacactgcttttatagccattcaacgtatttggttcaagcttgatgtcagaggcctccttcagatttgttcttgtcctcactgaccgccgagttatgtaggtgcagggcgagctctccccctgcgaatgagcacctctcacaggattctgtctgtgttctctcgccgcgtgtctagtcaagcacccgctggcaactgcggcttgggctggtccctctggctccttatcttttttaatgggcaaatttttatacagaactactttaggctctttcagtactaagtttcccatttcgagttttcttgaagcattcttttgctccagccgcttgcaatgatttctcaattttatctttgaaagtaaaggctttgcaggcttcttcagtttctttggtaccctggaattatttatatgagttagcttagatgaggtagagttggaagaagctggaattcttgacatagattgcctcgttaacgttctgctcttgctattcttttttacgccaactgaagattttcggttagaagctgtaaggttaaagagaaaaaggtgaaaagccttggtaacagcagagttcaagaaaagaatgcccaaacccaggctattagctacagcacgtttagattacacaaacgccaacaccacggctcctgctgcagattctgccagcgcacctgcattccctacactgcttctctttgaagttcttttctaatttatggggcatctattcatttttgaggtaagtagttgcacggttaaggagcttttcacagcagggacctagattccactctaagcttcttaatctgtcgtgacactggcccaaacgaacgctttcttctcctgatttagtagtttcccacataaaagatttcaaagaaagttaacatggttttttcctttcacagattctccttagtcatttaaaatgtttctaaaatccattgctcattaacctaaaggaagtacagcacttggccattaacatagagtagaaatagaatactcatgggctctaaggaacaaattctatcgcaatggtttcaaacaagaaaaacagatgctaagaaccatatattatcactctgaaaagtacagtcactaccgaaaaagaaatgcactattctaagttgtccccttcaactccgtgaggaacagaagaggcaaccagtgggctgtcaacttagaagagctgcaaagcttactcagccccatcccttcagtgacggccagatgccaacaatcacagtgaaggaagatgcacgctgctagaattgtacactctcaggacaaagggagatccaacttctttcctccaaggccaggatagaaaagggttacaatgaccctaatggtaatgacaacctgagtagtgatgaatatgattccatttgagaatgagcgtattcttatccactggaattatacagaactactaggtagaaaatattttttaaaatataaggatatttagataattcttttgctacagaatttctttatgcttacgaggcttgcctacaaggtggatcgaatagacgtgctgtcaatataaagaataaagttgaatggcttctcaaaaggcttcatttgtgactcaagcttaagctgctcctgtagtgtctctgaccttgccactgactttctgctatgttaatttttcctctgtattgacattccagactattatttatagaagttgttacacaagtcagtttctcaattacttagttcttgcaggtccagttgaaaaacttcttcctaatcaaaacactccatttacagattcactagagaagccacgataacaaaacgaatcatcaccacctctcatcagaacagggaggataaaaacaataaaacatgggtaagctcagcacactgcccaaccaagtgaggaccaggatcctgcagagaaatctgtcgctttctacatgcctcaggttgccagggcaactgccattccttccgcccagctaagcaagtaagttaccataagttcagtttttattgagagaggagcaagaatgcatcacaacattccaaaaatatcaaaccaccaagaatagaaggctctgcacctgaggtcaggagttcgagaccaacctggccaatatggtgaaaccctgtctctactaaaaatacaaaaattagtcgggcacggtggtacgtgcctgtaatcccagctactggggaggctgaggcaggagaatcacttgaacctgggaggcagagtttgcagtgagccaaaatcgcacgattgtactccagcctgggtgacaagagtgaaacttcctctcagaaaaacaaaaacaaagaaggtcctgcacgcacagactggctcataaatggcttcagggtacataaaccagcagaattcacagcaaagggattcacagtttgaaacaagaacatacttacacatgtgggctgctaccaaggtggcgcctctttttagaatagtaggagtagtgaactttgaatgtgattcaatttgagaacgagtgatttattatccactggaactatacagaactatgtgatagcaaatttttttttaataagaaatttagaaaataagaaaaaatagggaactcttcggctaaagggtttctttatgcttgcctacaaggtggactgaatggacgtgctgccaatataaagacactagtgaagaaaggactgcactgcttggcttccctttgcttggctctctcagatgtggctacgatgatcctttgctcattctatgcctcctcaaggactaatttatgaccaaacttagtggtttccaacctttgatttctcctctttccattccactctcatgacgtacctgcaagcacccttacacaacactcacatctatgtcatattctcaacagcaatccccgccatctggatccagcctgctcctccaatgagacagcctttggtgatctgacaacttcttgtcgtcaaacccagcacacactcctcagcccttccctttcttcatttctctgaatgtgacactgataaccactttttcttgagaaaacctttcttctcttggctgtcaaagagagcgcactctcctggttcccttctccatccctggcaccctccttcatcggccccttagactgttcttcttcaggtctgtgtagtcctaggccccaggtgacaagcacccattctcgcacggctattaccacttacaggctgacagttcccgaactctggccagacccgctcctaacttacagaaccaggtcaccaaatactgactgtctctaagcccctaaatggaactcaccatcaagtctcctgacgacgtcccctttcgaggtctccatcttggtcaatatcaccaccacatgcccagctgccaaagcagaaagctggaggtcctccttgactcctgctctcctgaactgcctcaccaagccaatcaccatgtgccgtggagtccacccctgcaatgtcactgcaacctgtctactcttccctgtctcgaaagccacagcctcctgcatgaactatggcagttttgtttttcctattgttttcccaacaatccgtttaccaccacatagccaggatgactttcctagtgtatcatgcagcttctgggctttaaacctttcagcaacctaatgccctaagaatgaagtctagaattttaacctgtgctcacatctcttcttcttagcctgtactcgccatgaagaaaagctttgactcaaactcccctctgtctatagagctgtctgaaaggccctctgctttgaataggcttcacttggccaacttctcatccccctgtaagactcagcttaggcaacacctccctgagggagcctctcgggactttctctgcaatgcctttcctatgtcttctcacagcacccaagaagctccttccttggtacttcttattttcacccgttggatgactcccattttatggtgattctgaattcggctctccccatcccatccctccttccaaaacattcactgttgacaacagaaaaccaaagcacttttatgtgtttgtctctaaactaacataaacgctccatttttgagcacaaaatgggtatgtatttgatgctatgtattacatcaacacagagatttcacttacatgttaccaatgtattctaattttgtttgaaaagcattatctcatcaaaagccctgtcaaaaggtatgctcatcaaatcaaaggaaaaaaaagacaggcaaagaatttgagaaatgtgacaaagatgaggacccagtagagtgacaagagtccttcactgtccaaagaagctgcactgtcctggcaggggttgagaatttcagacagtgaaggctaaaggaggaagacagtggccacaatgacaaactaaaagtcaatgattttaaagtccatcaagaaaccaaggactatgacctaagtggggtcagatgcacctgtgtttgagcttgctgtggcacttatatgcctcgtatgactcttcccctaggggctgggacaaatctcaaatacatggacctggactgtaattttaggtgggggtacacattcttctcagcaattactacatgctaggtgctgtgcaaaatggccacattcatcctaatgaacgccgttggaagggaaagcgattaaagctatgtgaaaaccaagcttacacgaactagcatgcctaaggtcatccagctggtgaatggcagagatgggacttgttaggccttcctgagcattaaaatcacgcttatgctgcctataaggcatatacagaagaattatggtgttggcctcaacttacgggtaaaggccccactgcatggctattatggtcatttcagggtgtcctcaaaatcataaggcagggtggcacaagacttccagtcagacaaaagagctgtgaccgacaccaaagccttcctgagcactcaggccgcactggaaatgcacaatcagcgtgaactaagataatacaagggccacagctgagcatctccagagctggaggatccagaaggcctctgacaggactttaaagacctcggtctcaaggagtttacttggcacaagcagctttcatctgacatgactagcacagactgccaatggctacctggaacggggtgttagaatttggaagcagcccgaaggctcagcagaaaagtgttcagatcaactcttgacatgagtgacagggcaggagtgaggagcagcgccccagcctctgcatctaggacaggtgctccatagttaagatcaacttctccctctggccgattcttctggggcttgtcctgacttgtggcacctgcagagacccgtgtccgcatcttcacagaccgctcgcgagcctctctctggtctcaccttccctatcacagcactaacttcagagggggcagcccagtcagcgaggcataagaggcctgaaaaaccagaatcctccagtcctggcattctaattcagacctgtggactggatttgtgaaaacggattccttgttgtctctacttctggatgctaaagcaaagtcacaccatagctctcaaggtactttccgaaaaagcacctgtatggaaatttttcttccaactactcagaacatttttttatacatgtgttcaaagaaagcagttcctctgtcagctgctaaattctaaacgaaccacatgataaagatgagcagccacacagaaaaagcactccgcaaacacatacacagcacatgcacccaccaccctgggaggagggactggcagtgctggctttcctgcaggatgtggcttccagaacctttctttcagacaggtggaggggatggctgagacaaacaccaaaagaaatacagcctaagagaacgcatgtaagaactcaagaaatccttatgtgaacatgacttaacatacaatggtctcagagacaactaaagccttgagctccttcagagagagcactgagccatgcctatccactctgcccatgacctcagagttagtcatactgatccttggattgctccaatcatgctgcagaaagggaatttgaataagccaagcaccccaatatcagcagtccctgcaaaatgtacacctttcttctgtaatgctgagacttcagcttaaagcgattattcagtccctctgaacttgaaagcctgtgcctccagtttgttctgcttacttgtgcacctgtcttatcctggagctaagtaaggcataagctccctgaggaaagggcccaagtctcaaacatctttgtatgtcttcaagaactagcaggatttcagtaagtatttagtttgttaatatatattcccaaatatttggtttaataaatattaatagttaaatattagtacacccaacatcttccaaaaattatttgtattcttatcttttaaactaagtagtatattgagttcagtagctatacaccagtaataaagttactacttaagcataaaacacctacatcacatagccattcaacataggcaactctgtggctgtctccatatacagatggcagcacgaacctaagtgtttttgtttaaaaatcacaggtctctggccgggtgcagtggctcacacctataatcccagcactttgggaggccaaggcaaggcggatcacctgaggtcaggagattgagaccatcctggacaacatggtgaaaccccgtctctactaaaaatacaaaaattagctggatgcggtggcacgtgcctgtaatcccagctacttgggaggctgaggcaggagaatcgcttgaacttgggaggcagaggctgcagtgagctgagagtgtgccactgcactccagcctggggacagagcgagactccgtctcaaaagaaaaaaaaaaaaagacacaggtcttactatgttgcccaggcaggtctcaaaactcctaggctcaagtgaccctcccacctcagcctcccatgtagctggggctacaggtgtgccaccatgcctggcttttaagtgtttttatgtctgcatttataaaatgggcttcacaagtctccagtttcaccaaggaaccagactcagaaaacaaatggtcgttatgctgcatttattatgagaatcaacagtcaacagttaatgattgactaactcttgttgttcactctggacattaacgaaaaagactggaatagggctacagcgctgcttttatgctacacgggttatgcttggactctgactcccagcagcaggtagattcaggaattcatggcagtgacattcaccatcatgggaaacaccttcccttttcttcaggattctctgtagtggaagagagcacccagtgttgggctgaaaacatctgaaagtagggagaagaacctaaaataatcagtatctcagagggctctaaggtgccaagaagtctcactggacatttaagtgccaacaaaggcatactttcggaatcgccaagtcaaaactttctaacttctgtctctctcagagacaagtgagactcaagagtctactgctttagtggcaactacagaaaactggtgttacccagaaaaacaggagcaattagaaatggttccaatatttcaaagctccgcaaacaggatgtgctttcctttgcccatttagggtttcttctctttcctttctctttgtttagtcttcgttctctttttcagtttccatcagatcttgcccccacacaccactggaatctcagaggttgcttctttctcctttccatctttactcctactttctggagtagccaatacagcatgtcacaatacggcactgttcaaaatgctcctctatcacaattctgagtctggtactggtggtctgctgaactgagtcagttcgttttgaaaaaggtcagcaagcaatgaaaaggtggaagccttaaggccagaagctatgaattccccaagtccatcatcttttctaacaaactggctaggcactggaatgtatagagtctaatttaattctactcagtccttttgtcttcttgcaggacttagcgacatcatcacagtctctaacaccttgaaaatgtttaaaacatatgatgaccttggaacatatgatgaagaactcatatccagttaccaaggtattcaagaaaaatagtctagaggacggtactgaagttagagatgggatacagactgtgcctctactcaaatcacgtctagagccttgaagtgcagccaaagctcacaagtcccagtctctctgagtatttaaaagtttaaaactactgaagcacactttataaagcaaattgtgtgaaaatacttttaaaagatatgcttatcaaatctcccttacttacttgcattgtttttttcctgagtggtatctgcatcagtgttagagctgacagattgactgtctgaatttttgctgctgtcacctaactttttaagcctatttaaacgtttatctgtttctctgagtccatatttgctattgataacaggagcaggcgcaggcagtcccactctggatttaaaagcaccagtgccccgtctgaaagagaaaatagcacaggttaaacaaatagaacacactttcttataataagcttaactgctgagggtacttggctacaggttaacagatgtgatgagctgctgaggccttaatcaccactggaaaccgaagactagaactcacaaaggaaattaagtatctatattataaaattaactttaaatctatatttaaaataataaaacaacttgttatgactattatcaatcattaattgcctatgagaaactactggaccttgtaaaattttttccttttttttttttttttgagacagggtctcactctaccgcccaggctggaatgcagtggcacgatcatggctcactgcagcctcaacctcttaggctcaagaagtcgtcccacctcagcatcctgagtatctgggaccataagcgtgtagcaccaccaccagctaatttttaaatttttttttgtagagatggggtctcactatgttgcccaggctggtctccaactgctgggctcaagggatcttcccagctgggtctcccaaagtgctggatttacaggcgtgagccacaaagtccagccctttaataaacattgccagattactttgccaaagggatagagcaaatcatggtcccactagcatggtgtgagttcctgcttctccacatcctcatcaacggtacattgtactccttaaattttaccaaagtgggccaggcatggtggctcacacctgtaatcccagcacgttgggaggctgaggtgggcagatcacgaggtcaagagataaagagaccatcctggtgaacatggtgaaaccctgtctctactaaaaatacaaaaaaaaattagcccggcgtgatggcaggcgcctgtagtcccagctactcgggaggctgaggcagaagaattgcgtgaacctggaaggtgaaggttgcagtgagttgagatcgaaacttacacagagcaagactccgtctaaaaaaattttactttttgccaaagtgatgagtgaaaatgaatacctaatcttgttttaatctcatttatggccatttttttcctgtgaagcatctctgcatctctttttcctttaccttttttcctatttgactatgtcttttccctataagcttataggagctttttgttattagaattttttttttttttttgagacacagtcttgctgtgtcacccaagctggagtgcagtggtgcgatcttggctcactgcaacccctgcctcctgggtgcaagcgattctcctgcttcagcctcctgagtagctggaattataggcgcgcaccaccacatctggctaatttttgtatttttagtagagacggggttttgccatgttggccaggctggtctcgaactcctgacctcaggtgatccacctgcctcagcctcccaaagtgctgggattataggcgtgagtcacacgtgcgtggcctttgctttaaattttctagagtaaaatgtgcagtacttatgaacatattacaattactactgtcagtacagtgtagcagagaaacatgcttcaaatgtatcctggagtgtctagcgcgactcagtgtctctgcacacgtgattccgtccattctcacttcttcacggagcctcttccttttaccctctggctctcagcacagtgtgtgtgtccccttcactgaactgccctgacagctggcactgtgctggtcttgtttatcctgcatgcacttggcctaacattaagtaactgttcagttaatatgtaatgaataatggaatgagctcctagatgcatcttcccagctaatttctgtaaaggcagaaacaatttggtgtttatgagaacttcaagaatatatgcagccaatcttgaaatcaaactgctcaaacagtctgacaatagccatggccactattctccatcatgctgttccatttaaaaaggacttacacacgtttctatctacttctcacactaaccttgtggagtaggtgggattatcctcattttcaccagtgagaaaacagaggctcatgaaagagaactaatctgctcaaggaaaatgactatacctgcagttctaaaccagggaaagagctgtttcggtgttggtttggaatcctcagtatgtggttaggtgttttcaggaccgcctccaaaaacttcattatatatatttactctattcattcatttaccaaatatttatcaaggacttactatgcaccagggtactgttctgtattctggggatatagcggaaaatgaaacagatacaagcccctgccttcatggagctcatattctaatgggaaaataaccagaaaccaattattgtagttaacatttgtgtattaactgtgtgctattctacatgctttacaggaaataacaaatttagccttcacatcaaccctacaaaataggttctgatgttatccccattttacagatggggaaattaaggcacaaagcagctaagtgacttaccctacacatcacatagctaatgaaatgcagagttgcaggattccaacccaggcagtctgatttcagatgataggcacttaactgttatactgtttcctctacaaaatgattttgaagaattattgaactataattaaactactttaaagggtattctctggactggtccaagatctaaccaacatgtgaataatttttatgtagaaaaagataaattttatgtccctctgccctggtaaaaattcagcagcactaggaactggttttctgccacatctttatggcaaggagcccactcagtgctgggagagggatggctacggtagcactgtgacttgatgactccgtcctctctcaccacacagttggaaatccctggctatccagaaaggagggaaatggcaactggggtatctgcccactgcaacctctaggctggctatttgtaggtgttttaaagtgggagaagtgacactaataactctgatcataactccaaaagcaatatgaagtggaaagaatgaggactctgaagttaggctgactggggtctgatacttatgttctggtactcgcaatgtgggcacctcctagctctctcatgaatatctgtgagaactgaacaaggtggtgtgagtaaagtgcctggcacagtgcaagatgtgcaaaatggactccaggtttccttctctgtggcctgtgtggtctgtactgcctttgaggggactcttcctgcagcccttgcctgcctgagcctgtgacgctcccttcatggtgctctcacacacagaagtcactataatgagcaatatgaactggtggtcctgccaatgaagatctgggggatttctgtaaagactccaggactcttgatgagacataagaagaggttccttattgaatgactgatatcagggaacaactcttaagaactgtgaaaccaaaattccagaagacacagcttgataatatgcaagacgactatcagtggtgaactccacttgacattttgagtagcggcaaccccattctggcattgcgtgtgtgcatgtgtgtgagctattaaccattctctccttaagcacatctgtattctggcccactcttagctggtaatattaagattttaaagggaaattttaaatttattgagggacattccaatgtccctaaatagctgtgcagcatttgactttgttcatacacactgcaccagccgctatgctaaagaacataaagactatctctgcatttaaacaacaaagagataatgtgagtttaatccccataatcaggttgttaacaaaaaatgtttaggctgaacattttacttaataccttacctttcgcaagtgtaacactcgcagaactcattattttctccaaagaacccatctccataataacaagaaatttcttctccaggttcaatgtctcttagagccttcacacatgctgtatctcgaccagttgacacaaactaaaataaaagtaactcagtaagaaactcacacctgaagcaaaaacaaaatacttgaagaaaatttttttaatgcttaccttacaattaggtctgcaatctgaaaaatgtccaaaagataaagtcaattaactgttgataagatctgaaacacgaacaattatagaaatctgaaataagctttccatataactttacaacttttgataggagtttaggtctcaagttcaactaaaggaatatacatttattttaataagtttgtggaaacatttctatttcaaattctcctttaaaggaagataaaggtttgactgaggttgacaaggccattctagcagttagcaggaatggccaacactagcgccaacaccttggaaacacagcttaccatggtttataaacgcagcaggacccagccagagttgagcacagtttttccttgtggagtacatgacactgaagtcgttttctccatgtctaagtagcatgttctcctcaatttctgaaagttcggcaatacaacccaccagtaattctattttgtcatttcgtttcctatttaaaatatgtgatgtgttaaaaattactagtaattaaatatagtaaggcttcttttaataaaataatcctgacaataaatatcagaaactgaaaaggcctagctgtctatactttagttagctcactgggatccccacctggctatcttctctcctaccctggagctccacagccttgtgccatggttacttgtgtacctatcttattcctgcaagagaatggaaactcaaccaggacagggactatgccacctatgtctctgaatgccctggtgtggtgttttgcaagcagaaagtactcaaatacttgcggcaatgaattaaactttctgactgctggatgaagcaggcagggaccagtggcagtaagggttatgaggatccggaatcatggtgccactctttagagcacaccatctgctaggaatataatgcaagccaaattttcaatcttaaattttttagcagccacattgagaaagttaagtgaatataggtgaaattactttaacaatttattttattttattttatttgagacggaatctcgctctgttgcccaggctggagtgcagtggcgtgatctcagctcactgcaacctctgcctcctgagttcaagtgattctcctgcctcagcctaagtagctgggactacaggtgtgtgccaccacacctagctcattttttttttttgtatttttactagagatggagtttcaccgtgttggccaggatggtctcgatttcttgacgtcatgatccgcccacctcagcctcccaaagtgctgggattacagatgagccaccatgcccagccaacaatatattttaacccaatatccaaaatacgatttcagtaggtaatataagaactatgaatgggaataaaatttaatatgaaatctggtgtgtatagcacacttacagcgcttctcaattcagactagctacatttcaaggactcaagggctggtggctactgtaccggacggtacagctctaggactctagatctcaaacctacacacccatctgcaacacagggagccacataatccaactagcaggctcaatacatcctgaggtaaatgaagcacatttcatgtacacacactcaccccagaggcctggcaataaagttcttttacctatccattttcagatatctgaccccccaaatttttgtggtagaaatatcagagggtgggtacatgaggagctacatgtttttcctgggagataacatagggaacaggcatgataggaaagaagatacagtagtatattctctttcatctgtaacttttatcccttttagctgggctcaactctgacttaattttgagatagagtctcactctattgcccaggctggagtgcagtggcgcgatctcagctcactatagcctctgtctcctgggttcaagtgattctcctgcctcagccacccgagtagctaggactacaggtgtgtgctaccacgcccagctaatttttgtatttttagtagagatggggtttcaccatgttggccaggctggtcttgaactcctgacctcaagtgatctgcctgcctcggcctcccaaagtgctgggattataggcgtgagccaatgccccccaccaactctactatttttattgaagctggcatatatacatatatatatatctgtatgtatgtatttttaagcaactaatgctttagggaggtttccacccataaaactaggatcattaaaactttagccccaacctttcttctaggccagtagaagactgactgtggaagccaggttatctaatcacggtatccacaactcttcagcaatcatatcactgaacaggcatccagagtcaataaaggaaaatgaaaagcaatttggcctagagatgggatctggttcaactgagacttccgatttccccactctgactccagctgatgggccaaggcaacggcgatgcattggctacttcagggtaaactctggcttcattccttaccatgaatttctcagcacttcaacaataatttagaagagaactttaaattaaattaaaggcttatactagtagaatagttaccactcttttgttgcaactattttggctccattttgttctgatgagtatctattacatggcaatatttcaaatccactgtcagttgcaaacattcgcaaataaataaatacctaaaacaggaaaaaaaaattgataatgactttaaatggtataccctgctagactttcttacaattataaaagcaaaccacccgcaatgatgaaaaaaatgtaagatctagcctgagcaacatagcgagaccctgtctctacgaaaaacattagccaagcatgatggcatgtacctttagtgccagctacgtgggaggctgagaggaagaatcacttgagcccaagagatggaagctgcagtgagccataatcaggccactgcactccagcctgggtgacagagcaagattctgcctctaaaaaaacaataaaataaacaaaaaaagtaagatcattaggtaacaaactttattgttactcaagagttttgaatgtcacaatttttctcattttgcaatatttgcattacagtaactagctgaacacctctaaacaaaaaattcaaaatcctcccatgagcatttcctttgagtgtcaggtcggtgttcaaaaagtttcagattttggagcatttcaaattttggggttaagggtactcactctgtatgagtacctaatggcttgtttcccttaaggctcataatgaatttcacctctatatgacaaagttttctctccttttttggttttagagacagggtcttgctctgtctcccagggctggagcgcagtggcatgatcatagctcagagcagcctctaactcttgggcacaagcaatgcttctggctctgcttcctgagtagccggaactacaaactacaaaggtacacactactatgcctagctaatttttttattcttatttttttagagatggagtcttgctatgttgcccaggctggtctcgaagtcctggcctcaagcaatactcccatcttagcccccacaaagtgctgggattacaagcatgagccactgagcctggcccagttttttctctggactgtcatccaaatgactgtatgtgttacaagatcttcagactgattagttttatgaaaaataaatttaaaatttcagtattaactaacatttagggttttaatttacttcactattcttatccaaataggttaacagcatcagtcttaataaacttacatgttctttgaataatttctcctgcattttattcttgttgagaaaatagtgccgtgcccattcgcctgaagtcaaacatttgaaggctttctccaagtgttcatctttcttaaaacgttcaattacttcctttagttcttcctgccttcctttaataggcctaaatctgaaagaaatcaaaagaatgaatgggttatctgccacaatccttgcgccactgatccatcttaacagatcttgagaaagagctaataccctaaaaacagccatggttatcagagcaaagatctaagagaagagaacaacaatcaatagtcttgattactactattcaagtaatactgatcacctggatacgcaagttctcttttttcaatctgttattttaatatttttatttcactgttatctcagtaacttctcttttttcaatctgttattttaattatttttatttcactgttatctcattaactgtgaggtgagcagacgattcaaacaaaagctgtctgattcagacttacactagtcgtcaactttgggagacacaaaatcaaagctctagaatacagcacacctaatttagagttagaatgacaagaatctttttaaaacatgcaaaatcaagctggaagagtgccaggcaatgaatttcagaagtatgatgatgtaaacaaaaccatgccatacacaaaaacattctttatgtacacagtcagaaaaaaccccaaactaagtattccaacaggcttcgaaacacaccttgatgttctaaccacccatgtcaaagtcatctttgatgactgcattcagagaacaaaacgagtacaagcagtgttaactctagtggtgaaattgctatactggtaatgtaggaaaactgatggggtagagttgttttttttttttttttttgagatggagtctcactctgtggcccaggctggagtgcagtggtgtgatcttggctcactgcaacctctgcctcccgggttcaagtgattctcttgcctcagcctcccatgtagctgggatgacaggcgtgcgccaccatgcccagctaatttttgtatttttagtagagaccatgttggccaggctggtcttgaactcctaacctcaagtggtctgcccaccttggcctcccaaagtgctgggattataggtgtgagccactgcgcctggcctgcaggggtagaattgaaaaggcttccattgtagaatcagccacactgatgtcttcagaatattatcccattaggtctgtatttatgcatgatgcagtcatggcccaagcaagacaaatttgtgaacccctcattctaaagctgtgttttcagtaaaacgtgtactataaagttactagcatcttaatttcaaattttcttttcatgtcaatttcataaagctaattctcccaaataaagtttttattttaaaaaaaagttttattttattttcataaagctaattctaaccggattatggcccggtatggtggctctcacctataatcccagcactttgggaggtcgaggcggatggatcacgaggtcaggagatcgagaccatcctggccaacctggtgaaaccccgtctctaaaatgcaaaaaattagccaggcccacgtagtggtacacgcctgtagtcctaggtactcaggaggctgaggcaggggaattgcttgaactcgagagttgaagttggagtgagccaagatcgcgtcactgcacttcagcctggtgacagagcaagactctgtatcaaaaaaacaaaacaaaacgtccaacagaaaaaaggaatcaccgattgccattcaaataaaatacattaagaaaaaatattagtggttcaggagaaaaaaatctttatgtgtcttactctgacatttaaaattgtacatttcataaacctgaatatgctaaaattgaggtaagatctagcacaaactccagcaaaggaagcattcagcagaattttttttcctagagaagctatcatatatgtattcatagtatttcagtaagatttcaagccacagtatttcatcaaggattattaggtgctgtgttgtgtatacagtggcatatgaagtgctatggtgaaaaatacaagagaagacatggccactgttcttgaatggaaaatttaattgggactaaaagacatatatatgcatcaaacagttaagcaagtgatcaatatgcaaatgcatgttaatatgctaaaaactgcattgctatagcacctaaaagtatagaaattataactagggtgcaaaatgtacatgggaaaggtttaagaaaagcacattataagcaggtaagaatcaaaaggaaggaagaatgaggggaagtctaagcagaagatcttaatcaagctggattcaaagagttgaccagggtcagctaggtagcaataataaagtaaagtaccagaatcaggaagaggaaagacatgaggtcctgaacaggtataatactgtttactggacaggatcactggaagacttcaggtgtattaatgcatactgatactaccaggaacttactagctacacactctagtcattttttttttaattcagtaatcctgaattctcacaactattagctgaaccatctgaaagttcaaacatatcctagagataatactgaagaaatgaacagggccctattttccattttcaatcaattggtatacaagcctttacagacagataaatgcaagtcctttaaacaattcagaacgtcttactagtctgtcgacatatggtgtcagagaaccaccatgaaaataaagagctgtagaattgggaaagcatccaaatatccatactcaactacttgtagccatcacaattgattgtgtcaagataccatctccaagaaatccaatggaaaccattcttgctgcaatcctacactacatggttatttgcacatgaaggacagataagacaacaaagcagctctcagctaaggcatgacctgtcgagcaatatgaaatatgaaatatgaaatggtgggaaacagataacccgtgctttgtgtggcaatcagaaaagcaatagttcactttaagcaaatgcaataaattatccatgccgttaaatgacagggctacaaacgacagaaagggccaagctatctttacacgttcaatgtgaaagtgaccaatgggaacattatacaaaagtaagttatagacctggaatgaaacttggctatttttaataggctttatgtgtgttctatgctttctgaaacaagttcattcctatctaaaaatgccttcaggtaaccttggttttgtttactttttattcataatgccaaacaatttacatgctaaaaccaacacaaaatagtcaactcttgatttagtagtattctgcctaccttccctgtgttgacttctgtttctgctttcctgactttattgcctcaaacataaataaaacccctgaaactatcccttgctaccaatagcaagaacctctatttcactaaaaatataagttgctgtcccaaacctgttaaaacttactgtcacagttggctgctatgggcatgaaatgacagtaaggaaaagggggaagaaaatggttaagggtgcagacaggcaggagatgagacagttgttttcaataatcctacagaagtatgtaaaagtcagctggctgatagtccaaatcaaatcccattgtaacaaatactgtggaaaataaaagttaagactgttatacctattagggctggtgcaaatgcactgaaaaccttagggaaatttttttttttcctattattgaacagaaaaataccctctctccttaactataatcactctaaatctcccatacaaactgcataaaactatccttttactctgacacttaaaggccagataatttagaacagcccttttgttccacaaatgaggaaaataaggcccaacaaggctgagtagattgccaatgacttagggttaatgaatggaagacctgggatttaccctggcctttctggttcctgttatatcacctggctcaggagagccttcctcacattgtttcatggttagaagaggatttgacttgcgtttgccattgaacatcagcactgggcccagccagagacagctctagcttgtatactgacaatacagtggaagggatggacgcaaatgtgaattttaaaatttcgtatttgggtgggggggtgggtgacaagggaggcaagaaaaacagttatttggcatttccaaaccaatatgccccgtcctccctcccttaatagaaaatttgctactttaaatcaaccaaacatatctattttttctctttttacacttccaatcaatggctggtataagaaaaataaaaatgtcatttacaattgattattattaaaggggcaggaaaaaaacatatgaattcacactcccacacacctgttccccactctttccagagactcacttcccaggttttcttgctatttggtttttctgtctccccactgtggcagtgaagaaaagttgtagactgtattagctgtgctactgtgcccttcattagcatgcacaatcaagagctgactggaggggtggggaacaggaaggggaacagaaaaaagggagacagggaaggagagaggaagagagaaaaatgctcaaatatttaagatataaaataaaaccatgaggcaacatagtgaacacatttccccctctgaagaaagtttagctgcaaatccacagtttgtagacgctgagtgaggagtcgcagatcagctcttcagtccttcttgacctgaaaataaacgagaaccaaaaacatacctggctgagtcctgcaatcagtgctcagctaatcacatggagtgactcctgatcttttgaagaatgatttgtttctcttaaaatcaccctgttatgaagtacaagtggttttttaaaaaatacaactattatcaaactactttaaaaggtttgtaaaatgttctaaaactctaatttatgctgacacttcaaattacttaacataaaagaacattttaaaaggctagaatgggttagtcagtatctcattgtttttaacacacactacctacctcacagggttgttgtgagaaaaactgtcagattttgaaaaatgccttgagctcctcgaaggaaaggcgctatataaatgcaaaaacaaacaacaaaaataaaaagctatttgtataatctgtacttgtaatttctaaacagacttacaatattcgttgttgcaaaaatctttaaaactctgtgataatcaagaactttaagataccacaggtgggcgcggcaggatagaagccatgctgctgaaattctctgcttcccatagaacacaccttaccatgaagttagaagctttgaaaacattctttacggattctagtcaagcacttaattttaaaatgatatttaaagtgattcatattcatatccaatagtggatatgaataatcaaatacatataaaagtgaaataaaaattagatggttataacagtagaaaaatgagtaaggactgtacaggctgacattctgattagaaaaccaagaaaagttgaaaagagaaactcagtgccctgaagtgactcccctgatgtttaaatgctgtctcctgctcagctcactgctggcctgagtcgccttcgcgcctcaggatactgtgacatctcagggtcatgcagcctcaaaaagggggcattactgaaagcatcgatccctttcttaaaatatcccgctcccactccatttaaaaaccagaggtataaacaacaactctttttttcttgttaaaaagaaaactttaggtttcataattgacaaaagtcaattaagttcaaatttctcccaataaattgaaattagcattttgttcgtactatttctaagtattcatgctacaactcttgcttgttagtaaatgtaaggatatattaagattaaaacctgtgcactcaaaacatagccagttttgaaaattctccaatcattaaacatctactctttcttttttcttttttttttttttttggagatagagtctcactctgttgcccaggctggagtgcagtggtgtgatctaggctcactgcaacctctgcctcccaggttcaagttattcgcctgcctcaaactcttgagtagctgggattacgggcacgcaccaccatgcctggctaatttttgtatttttagtagagacggggtttcaccatgttggtcaggctggtgtcgaacacctgacctcgtgatccacccgcctcggcctcccaaagtgctggaattacaggcgtgagccatcacgcccgggctaaacatctactgtttctaaacattcttcctgttggtagactgaaagaagtaaaaggaagggaaaagagtataaaaaagagaaactaaaaagtgacaaattacaggtgcataaacatatgaacaaagagcgcactatacaaggaacaggcagagagcttagaaaattaaaatccaagagcagtacatcttctggtcacttcttttgcaccccaaagagagagaagtccataaactaacaatttaagaagtatttattggctatttactaccttaattaagcattatcagttttccttattttctaaagtcacattctggtaaattcttgctcaaaagatgaagagctagaagggatagttttattttcaagtaaattcactaaggttaattgaaaacatatacctttcaccaagattattgtaaaggtcattaataaagtttctgttcccaaatatcagtgtacacaagagtgtaaaagcacacgtaaacggaacactctggtgggaagtaggcaggccgtcccctgcactcccacaccggcctgaagtgctggcattgctaggaacccaggctgctctaaccagggcaacagaatcgtctgtacttccacaggttattttaggaactgtataattaaatgttggactaaaaaatacttaaaaaatgatttcttctgcaagtttaaccagctttaattttagatgcttcaattctatggggaaaaatcttaggcactgggtgcattttaacttaggagtcctcagttaatgtcttgagttccaaaaatatttgtgtggtaatcctgaagtttacatttatgactacatagttttacgtgagccctaggaaactcctagtaaggtatttttatccacttagcacgtcacaatgaaactgagaggccagatgttttaggacctagctattccaagtgtagtctgggagcttgttagaaaggcacaatctcaggccccaccccaaagctactgaatcagagcctgcatttcaacaaactcccaggtgactctcatgtaaactaattataagaagcaatggtataggaggacttttacagaaaactggagtgcttccttttgttttttaatatagggtttcactctgtggcccaggctggagtgcagtggtatgaatacagctcattgcagcctcgagctcctgggctccagtgatcctcccaccttgccctcccaaagtgctgggattacaggcatgagccactgcagcagaaaactggagtatttactattgaagatgccagtaacaggcagccttctggaatacggcacggggattttagagtacatgaagttctgtcataagccactaaaactttcattgtaattttttttttttttttttgagactgagtttcgctcttgttgcccaggctggagtgcagtggcgcaatctcggctcaccacaacctctgcctcccaggttcaagcgattctcctgcctcggcctcctgagtagctgggagtacaggcatgtgccaccacgcctggctaaattttgtatttttagtagagacggggttttccatgttggtcaggctggtcttgaactcccgacctcaggtgatccgcccacctcagcctcccaaagtgctgggattacaggcgtgagccaccgcacctggcccattgtaattctgatgtaacgctgttttatatgcttccatatcttggtaataaggcataatcaatataactttcttgatgaccccaggtcaagattctgggcctttgtggtgacattctgaatgccactagactactgtgtcaaagagtgattcattcacacattcacatttcttaactcaaaaaaaaaaaaaacaaagaaaaacactgggggtgctacagggtgacaaatattatcagcatcttctaggagaatgagcactggtctcatgttcaatgggcaaaaaaaaagaaaagaaaagaaaatggacttaaaataatgcaaattagttttttgtttttagccggagtcacgctctgttgcccaggctggagtgcagtggcgcgatcccagctcactgcaacttccacctcccaggttcgagggattctcctgcctcagccttccgagtagctgggactacaggcgcatgtggccaggcccagctaattttttgtatttttagtagagacggggtttcagcatgttggccaggctggtctcgaactcctgagctcaggtgatccacccacctcggcctcccaaagtgctgggattacaggcatgagctaccatgcccagtcctgtatcttttttttttttttgaggcagtctcactttgttacccaggctggagtgcagtgatgtgatcttggttcactgcaacctctgtctcccgggttcacgtgattctcctgcctcagcctcctgagtagccaggactacaggtgtgcaccaccacacccagctaatttttgtatttttagtagagatgggatttcatcatgttggccaggctggtctcgaactcctgacctctggtgatccacccagcttggcctcccaaagtgctgagattacaggcatgagccactgcgcccagcctggatcttaatcaatcagggcatccaatggcagtcatttggcagggaactgtttaaataatcccccaactccattccaatatttcacacttcattttagtaggtaaagatatatgacagaaaattttatggtcagacatggtggctcacgtctataatcccagcactttgggaggctgaggcaggtggatcacctgaggtcaggagtttcaagaccagcctggtcaacatggtgaaacctcatctacactaaaaatacaaaaattagctgggtgcagtggtgcacgcctgtaatcccagctacttgggaaactgaggcagaagaatcacttgaacccagaaggtggaggttgcagtgagctgagatcatgccactgcactccagtctgggcgacagagtgagactccatctaaaaaagaaaagaaaaaaaaatttatgaaaaaaacaaaagcatatttttacctgaattacttcttttggatttagactgtaattgataagtgaggcatatagtatcttaattctagcaagggataaaattaaaaggggggaaacaggacacaagactttcctctaattacctgtactcaccaattcctacctctcccaactactgatcagtgaccacctacctgggtatcaagttcccccagggttgccactaaaatcagaactatataaccccagtccgggtgtgatggagatgaaagtgatgggccagaactagctctatcttctaaatccctgctgttatgcttttccaccaggctaaaaaaccctttgccatagaggttaagagacaaagcaaagttgcaaagctctgacctgtttggtggcagatacatttgtgaaatgatctaatggtcttttttgagggagaaatggtatttaagagaattaaagagagacctcagctgttaaaagatgacagatttcaagattaatgtaataatgttttttatatacagcatttggtactcaaaacacttacacatccactttcttacctgcatactgaatataaacatgtctttaaaactattcgctcttaaataattagctgaatcccaaagattaaacatgatgacaaaattccccatctatacagagacaacgtgtaagagaaaagtctataataaaatcatgaaaaaaagggatgtaccctactttaggttggaaataatcatacactttcaaggtgttacaggatgcttgtcagatttttcttttcgctaagataattgtcatcacctttttttttttgagatggagtttcgctcttgttgcccagactggagtgcaatggcacgatctcggctcactgcaacctccgcctcccgggttcaagtgattctcctgcctcagcctcccaagtagctgggattacaggcatgtgccacctgcctggctaattttttttgtacttttagtagagacagggtttcaccatgttggtcaggctggtctcaaactcctgacctcaggtgatccacccaccttggcctcccaaagtgtggggattacaggcgtgagccaccatgcctggcatcatcaacttttaaaatagaacatgaggatgctcctccagctttatacgttaatagaaatgttctgaggtaaaataagaacacagagttagaactgacaagattcctggagtcttttctctgcttctcttggctcacagacagaaaacccttccactgcaaagaactttcctttaatgtcattttaaattttgagcaaaagtaaaattagccatctatgttcttgaattcaacataatcatctgttccattcaggataaagactgaaaattacctagtattcattttgtgtgtttgaaaacctaaatagggatcaagaaccaaactggttgctaggtcatcattttcacagagttccttggcggacattccagaggatggtacatagcgactctgtccttcaaatcccgagttaccattacctgtgaaaagcaaaagcaagaaaaattactcaaattgaaaactacttaaatctgccttaaaatctttagcggcattgcccattcaagctggtaataaagaactgaaaaatcaatcattttagtaattaagaatttaataacctttgcataagacagaaaaccaaatgcagtaaactatctccattactgagagtattatcgttagcaggtagtaatagcaggttcccaagaatggggtctgggtagtcgtgagaatttggttcaaatgcttgactctcccccacccccttctctccaaggaacactgagaaacgggacgggagcatgttcactattttaacaagacaatacacagggccattacagataggactcgactgaaaaggaaagaggaacacaagatagtttctgcaagaagcgccagaactccagatctcaagtatcaaaaggaatctcatgaagttcagcttcctgctttagggcaggtgaatgattattatccccactttgcaggcaactgaggcccagacaaaaagaaacttgcccacaattccagagctgggcagtagaagtggggaaagaagtggagagagaatgacagacctatttctactgacctctgtttgaagcaattatgaacgaatggataaaaatacagactgaaatatataactgaaataactgggtttaactgtggaagaaaagcaatgtaaagaaggaaatgaaggccaagtttgtaagaagtttcatcagagctgattaagtttgatgtatatgccactgacagtccttccatggaatcagcacatcatttatggaggacaacagcaatgtaactttcaggctctcaaaaccaaaatggggaagaatgaaacacagagtaaagtttaaccttttcatccactctttcacagaacaaatacttaaatgtaagttcctgccaagggtagacatatgattttgcaatcaaattagttgcatgtaggtatgtgaaaagctatcaacattgttaaatttttggtaacagcataatagctttattgaaatacaattcacatacgacacaactcactttttttttttttgaagacagggtcttgctttgccacccagcctggagtgcagtggcatgatcacagctcaccgcagcctcgaattcctgggctcaaggaatcatcctgcctcagcctccctagtagctgggaccacaggcatgcatcatcaaacctggttaatttttgtatttttttgtaaaagtggggtctcgccatattgtccaggctggtcttgaactcctgagctcaagccatcctcctgcctcagcctcccaaactgctgggattacaggcgtgagccaccacgcccagtcttctttttttcacgcaggcatttacaagtataaatttccctctaaaccaccgctttggctgcatcctgtaagttttagtatgttttatctttcttttaattcacttcaaaatgttttctgatttcctttttgatttcttctttgacccactgattatttagaagtgtgttatttcatttctatgtatttgtgaaattcccaaatttccttgttaatttctaattttcctccattggggtcacagaacataccttttatgatttcaatcctttgaagtttatggaagcttgttatacggtctagcatatgttctatcctggaatgctgcacttgcacttgagatgaatgcgtattctgatgaggttctatagatgtctgttaggcctcattggtttatagtcttaagctgttctatccattattaaaagtggcgtatcaaagtctccaaattattgctgaattgttgatttttcccttcaattttgtcagtttttctttcctgtatcttaaggctctgctgctgggaaagtcactgattgtatctgagatggggcactgctctgtgctctcccatttctcattgctggctctctttctgcaccattctggcccaataacattcaatgtaaggctatgtcatcttcacacactgggttttcccaacctagccctctatatttatctatgcttggtaaagtgtaaccaaagtaatggccattttcctttttcttttttttttttttttgagatggagtctcgctctgtcgcccaggctggagtgcagtgacgcaatctcggctcactgcaagctctgcctcccgggttcacaccattctcccgcctcagcctcacgagtagttgggactacaggcacctgccaccacgcccagctgattttttgtatttttagtagaggcggggtttgaccgtattagccaggatggtctcgatctcctgacctcatgatccacccacctcagcctcccaaagtgctgggattacaggcgtgagccaccacgcccggcccgtaatggccatttctaaactctttttttttttctttaaacaagagtctcatttttttttgcccatgctggagtgcagtggtgtgatctcggctcactgcaacctctaactcctgggctcaagtgatctttccaaccacagcctctcaaagtagttggaaccatagacatgcaacaccatgattggctaatttttttgtagacacggtagtttttgtagacacagggtttcaccatgttgcccaggctggtctcaaactcctggacttaagcagatccattcgccttggactcccaaagtgccgggactacaggtgtgagctaccacgcccagacgcattttctaaattcttgtgtatctataataattcaactaattaaaactgttttgcactatgatacacaaaaggaggccaacagtgatttcctaaaaaacttaagatatgcctagtttgctgaccagaatgaatacacactgatgtgatcactatatttctcaattcttcacgttcacactagctgctaaggagtgaggcaggatgagggtacatgctgccagcagcctcaggagtgagtggtgtccatgcagaggaccactcattcagtcttgcctcttcctactcttgtcccaagcaggaattctgtctggttttctatagcaacagtgacctgatctgaaatggaaaggttaagggtagcctgggcccaatgaatcgcataaaccctaaaaggtaagaaggaaatctatcagaacttgtacaatctgaaactacagaaaatcccaggctaatccaaatccctggaaacaggccaatgccaatctgaattaaggatattcaaaggtggctagattcacgttagaaaaagaagaaaagctgtcctctttaacatgacatacgtttggacatatagctgcctagttaggtatacacttgtcctcagtcattttactacttttagaggaactatgaaatacgcaccaaatctacaacttcctgaactctcaaaaagcagcctctttcctatcaagaggtatagaggaaataaagtaacttatcagcagtgtttcactgtcaggatgaacaactgtctaccctgtataaatagaataaattgctatgatttgtgaggctgccctaaagcagtcagttctatctatcctcattctacttatgtaaattacagttggcgtcattattcatattattccatgaaacatttgtggaaattagcaaagaagtacatacctatacttacatctattaaaaaaatacaggttaacctgtaagaagttcaattaaaattttaaaaatttagtaagacatatcaaccattcaggtaaattctacaaaatataaagtaacagacagaaaagcatgattaaaataattatatgaagcattaaacttgagttttatatagtttgatgagaataaaaattgacacaactttgagagtaaaaagactatattgttaattatgaaaatgcaaaaaattatttaagacaaaagaaaacagaatacacattacaaactggaaagaattactaccccatatcacaatcagaacattgaaggtttaagtgtgtacatacatctgttcgacctcctctcgactgcatttttgccagccttcagggtgtccttccccgtgtgctgtaattttgattgattctgctgatggtcattagacaacttgcctccatttctcctgccattcaccaccatgatcttggattctcccaaccacttcatacccacagacagcctgacccaggtgcatttagtcactctcttcaaatagcttagagaatactttcaatgttctctcctaacagaaacaaaatatgaaaaacaaaacaaaatggggagataaatacatgaaagatcatgctaaacagacccttgagaaagatatataatattaaaaggacagtcattcacagtataatgatgttttggtcaatgacagaccacataaacaacggtggttccataagattataacagagctggacatacacttcataaaattcgtattgcctagtatttactatattatactttttactgttattttagagtatattccttctacttttttttaagttaactataaaacagccccaggcaggttattcaagagatattccagaggaaggcactgttatcacaggagatgacagctccatgcatgctactgcccctgaagacgctccagtgggacaagatgcagagggagaagacagtgatatggataatcccgaccctgtgtgggctgaagctaatgtttgtgacctgtgtctcagtttttaataaaaaagttaaaaaaataaaagtaggaaaaggttatagaataaagatattttaaaaagaatatagctgagcacagtggctcatgcctgtaatcccagcactttggggggccatggcaggcggactgcttgagcccagaagttgagaccagcctgggcaacatggcaagaccctgcctctacagaaaataaaaaagtgagccaggcatagtggcatgagcctgtggttccagctacttgagaggctgagatgggaggtcaagcctgcagtgaagctatgattgcaacactgtactccagcctgggtgacagagcaaccctgtcttccaaaaaagaaaagaaaataataatatatttttgtgtctttttgtctgtgttttgagacagtctcactctatggcccaggctggagtgcagtggtgtgattatggctcactgcaacctcaaattccagggctcaaccaatcctcccactcagcctcccaagtagctgggactagaggcaggagccaccacatccagttaattttaaaactttgtgtgtgtgtgtgtgtgtgtgtgtgtgtgtgtgtagagacgaggtctcactatgttgcccagactggtctcaaactcctggcctcaagcaatccctccaccttggcctccaaaagtgctgggattacaggcatgagccactgtgcctggctaagaaagaatatacattcatttatttgagacagggccttgctctgtcgccccggctagagtgcagtggtgccatctcttctcattgcaacctccacctcccaggttcaaatgattctcctgcctcagtctcctgagtaggtgggattacaggcgtgcaccaccacacccagctaatttttgtatttttagtagagacagggttttaccatgttggctaggctggtctcgaactcccaacctcaagtgatccacctgccttggcctccgaaagtgctgggattataggcgtgagccactgtatgtggccagaatgtatttttgtatagctatatgtgtttgtattttaagccaagtattaccataaaagagtcaaaaagtttttagaaaaaaaaactttataaagtaaaacagttacaagctaaggttaattattgaagaaacatttcaaaataaatttagcgtagcctaagtgtacggtgttaataaagtctacaatagtatacatgtactaggtctacgcaattactcaccactcactcactgactcatccagagcaacttcaaatcctgcaagttccattcatgggaagtgcccttcacaggtgtaccattttaaaatcttttattctgtatttttactgtatctttatgtttatatatgtttagataacaaataatattgtgttaccagtgactacagtagtcagtacagtaacaagctgtacaggttagtggcctaggagcaatggcccaggtgtgtagtaggctagactacctaggtttgtgtaagtacactctatgacaactgcatgacaacaaaaccacctaacctcacatttctagaatgtgtccgagacacactctatgagtgcactctatgatatctgcacgataacaaaatcacctaaactcacatttctcagaatgtgtggtatccctgtcattaagcaatgcatgactatactttaataactgatgtctccactctttaaagacaatcttggctctccccaatcatatgatgcctgctcaggaatacagtgcccccagactggccagaatgtaaactacagaaggcagggactcattctgacttgttccttgcttgtgtttagaacagtactgacaaacagcaggtgctcaacaaatatttctctcagtaaacagtaagaaccatctttgctccttgttatactgatatctagtagagctttctcatctatctgctcaaactacatgttttggtaatgctctgaactgggtgagtaaactacaaggaagttatttatctctttgttccaaggcaagcttaggaaaaggcatctatactaagctttgtccatcacagtaagagactcctaactgttgtgctggctactcatcaccacaaacaaaatttagcagagggacaagagtaaggaaagtaaaggacttcatatctctttgttgttgttagtttcaattcactgttctagatatttaagaaaccaatattcagatatcaaagtagtgcccatctggaaatgtctaccttatcattccttcacaatggcaacaaaactgagaagctactgtattcggtaatgtaaatgtatctcttactatctgaatttgggaaccgattgatctgaatagtgggggatgcttgtaatttataatgacctttggaaatgaggatattatacatcacactcactactaatggaatgagaaaaaggatgtccatgataccacctcattatcgaattatgcattagtacaagtcagactaaaaaggccctacgataaagggcaaaaatacagaacttcagagccaaagatgccttaagatcatcagtgcaactccttcaatttgcaaatgaaactgaggccacatgcctaaaaccacatgatccacctgcagcagtctcacgagtagaacccagcactgctgcccaacaaattctcaactacaccagacgcaggtcaatttcctttccacaaacacatagaaaagtacaaatgataaattacttcgaagtattcacaaaaagacatgcctggacatacctttaatgatactcaacacaaacacaaaacatgaatttttacttgatctcaggtctctttcatgttacaggagtatctgtgtgagttcactggagggtaagatgtgcatgtgagcagtatgcttaggggaatggcaaaaaaaaaaaatctgatcaatgctaaagacaactttacaattgttttctaacatgaattttttttctggttcccttactatttaaattcgattatagtatttaacttttaacgtgccttttgatttttctcataggtttcactaaacagtcttctatctattctacatcagttataagctaaggatttttcaattattaaattttaccaaatttaacattaaaacctctcattaatgatcatatatcttacacttaggagaaaaggcatagaattgaacagcagtatacttttttttttttttttaagagacagggtcttgctctgtcacccaggttggagtgcagtggtgtgatgatggctcactgtggcctcaaagtcctaggctcaagcaatcctccacctcagcctcccaaagtgttaggattaccagcatgagccaccacactcagtaagagcagtgtacttttgaggtataaagtacaaagaaagcttgagaaaaagagcaatgggtggtccattgggagccttggatcttggatccccagcagttttgcctatggactctaaaatggacttcatttaaagaaacccatggaacagtaatagataaaaacataaaacaatatgaattgtggcattcaaatcctagcacttcgggagagcatcaagtaccaagtttttttttttttttttttgagacagagtatcgctccctcacccaggctggagtgcagtgtccacgatcttggctcactgcaacctccacctcccaggttcaagctattctcatgcctcagcctcctaagtagctggaattacaggtgtgcaccaccatgcccgcctaatttttgtattttttagtagagacagagtttcaccatgttggccaggctagtcttgaactcctggccacaagcgatcctcccacctcggcctcccaaagtgctacgattacaggcatgagccattgtgcccggccaagtgttcaaaaattatagcctactatcacaatgcattgaagatttgaatttcaataacctcgtcaagacttagatctttaaaagcttcaaggttcatctgcattaaagctctccatcattgagccatctcacaaaagtaaaagcttaaagggactaaaatccgtgactacattccattttatatcccttcctcagttttcttcaatttccttgacccctagggtctttcatattacttatgttcctttaagacaagagccaaagaaacagcactttctgaaaaacagatgttctgtggctataagctttcattggtacagatgcataaacttggcatgataaatttagaattaggttttttgttgtatcctataaaaagctgcattaacaacaagcaaatgggccaggtggtggcttatgcctataatcctagccctctgggagaccaaggcaagaggactgcttgaggccaggagttcgagaccagcctgggcaacacggcaagacctcattgctactaaaaataaaaattaaaaaattagccaaggatggtggtatgcacctgtagttacactcaggaggctgaagtgggaggatggctgcagcccaggaaattgcggacacagtgagccatgaccatgccattacactgcagcctgggtgacagagtgaaaaaaaagaaaatgatgaagtggtaaatttatataaatgtattttatatttcaagttagattatactctcagaagctatgtggtttacagaaaatagccctctcctatcccacctctgtctcttactaggcagttggtaaccaacaaagtcacttaacctctctgaaccttaacttccattatccagaaagtgaagctgatcatattttccccatccacctcacagggctgttgtgaggatcacatgaaataatgtacctaaaaaagttgtttctataaaaggtacaacacagatagatccagggtcctgttacatagttgcaagtcacactcttatctccagggcctgggaaggtaggtgatttaagcacacagaaagcacctaccatgtccagggcacatacatggtaacaagattatgttattttcctctgaatacacagaatactaccatgggctaattctaaggagcaagactgtaactttccctaaaattatagctcagcattcatagtgctctagggcaattatgggttgtaacatattaatggtttgcaacattttttttactatgttgtgaccagtaattttttttaaatgaaagaacacagagcagaatatttcacaatgcatcccacatagtaagttttgttttagttatatatgtgtaaatgtgtgtatacttggtcattaaataaaatgaatttttggccaggtgtggtggctcatgcctgtaatcccaacactttgggaggcccaggtgggcagatcacttgaatccaggagtttgagaccagcctcgccaacatggtgaaaccccgtctctaccaaaaatacaaaaattagctaggtgtggtggtatgcgcctgtaatcccagctactcaggaggctgaagcaggaggatcacttgagcccaggagatggagggtgaagtgagccaagactgcaccactggactccagcctgagtgacagagcaagaccctgtctaaaataaaataaaataaaatgcatttttttcctgggggtgtggggaagggcaatgcaccatgcctttctcctctgtctgcctggaatgttataacaccatctctttgcctaattccttaagtcccagttcagtgttcacatcctctaggaagtgttccttgacattcactgccaaatctagttatatacttatgctataaaacttaagtgaaagcccttatgtgactatattgtttaagtgtctgcttccttaattgagagttcctaaggttgagaatctatttttcttatctctggcccttgtgtatctagtatagcacacagtacatcctagaggcactcaactgatgaaataaataggttgtattctaaactgcatcatagaaactatatttctgcattaaaaaaaactgtaaattaaagatacttcctgacctcttcaaatcctctcctttctcaaaatgtccatggtgtgtaagggggtgagagaagctcctgcacagacagaaacaaggcaggaatcacagctgctaccaccactaacttccctactgcttgccattatactttctggtttactccctagtccttgaccctccagagaaaaagaaccaggaccaggaaaagtgcttttggtcctttaggaaatcatctgtagaatgcctgtgtttaacacacaacttatggataatcatggaacaatgtacttttaggcttctcaggagtcctaatatacctcaaaaataagacataaagcataattatatgaaatagaaataaaatatatggaatagaaaggttatccatggagagtctttttttttttctttttttgagacggagtctcgcactgtccccaagttagagtgcagtggcccaaactcggctcactacaacctctgcttcctgggttcaagcgattctcctgactcagcctcccgagtagctaggactacaggtgcgcaccaccacacctggctaatttttttttgctattttagtagacacggggtttcaccatgttggccaggatagtctcgatctcctgacctcatgatctgcctgtctcggcctcccaaagtgctggaattacaggcgtgagccaccacgcccggccatggaaagtctttaagtcccaaccaagatgtctacttgagagaaagcagaaaatttggggatgaggcccagcaatctgtgttgtagtaagacctccaggtgatgcaagctccagtgtaagagcaatcgctctaatttacttattcattttatcatgttagggcaaagaatagatacaaaattttaagaaaaattatggaataaaaaattaaggaaattataatatcaaccaaacatttttctgagaattaggaaaattcaccaacaaatcactttagtaatagcaaactttggttcaattcatggaacacagactgagatccactctaatgtgcacataatttaaattaaatgtgggttaatgatccaaactggaaaaaatctgtgccctcagatctcatttatattgtgatcaactgatattatttgaactcaaggtaatttaatctaacaggtacttctgtcaatcacagaacatggctaaatttcactagtatgaatgcactgcacatgtctggatgtagcctagcagagagagattctccacaggtccatatgataaaagctatcaaaagatctttcttaaactgataaatgaaacatttgtaaaaacaattctaatgaagctatcaataatttgggggctatttaaaaaaattttcagctcaaaatgaatatatattgtactaatgatcaggtcatcatttgttctgccctcctaagtgtggaatctgttcttgctggcatgatctttcctctaagaccacacgtttacacattaaaggtagcgatgggattttaaaaagctaacacaagtcgatactgtagtagagtatagacaaataggggttgaaaacatcccagcactttgggaggccaaggcgggcagatcacctgaggtcaggagttcgagaccagcctggacaacaaggtgaaaccccatccctgctaaaaatacaaaaattagccaggcgtggtgtcacatgcctgtaatcccagctacttgggaggctgaggcaggagaatagcttcaacccaggaggcagaggttgcactgagccaagattgtgccactgcactccatccagcctgggcgacacagcaagactgtgaaaagaaaagaagagaaaagaagaggaaagaagatgaaggaaaggaaaggaaaaaagacaagacaagacaagacaagacaagacaagacaagacaagacaagacaagacaagacagggcggctagcaaagcctaaatgcttcatagctaccacagaggtgccccctcccaacaaacacacaagggtgcagactcccatgggacatagctggctcacgtggaaatgtccccatggtcacggtttggctgacacactctgagctaattagccactgactacatttagaagtaaaaattgcctcaattttgtcccaaattgttaggaaaaacatttcaagaaagtactgactgcttcttttttttttgagacggagtctcgctctgttgcccaggctggagtgcagtggcacgatcttggctcactgcaacctccgcttcccgggttcaagccattctcctgcctcaacctcctgagtagctggaactgcagatgcacgccatcacacccggctgattttttgtatttctagtaaagatggggtttcaccgtgttagccaggctggtctcaatctcctgaccttgtgatctgcccgccttggcctcccatagtgctgggattacaggcgtgagccaccacgcccggccattactgaccacttcttaaatggtgtattagcttggtgcaaaagtaataaagtaattgcgttgttttttttttagttacaaatcctgttctgatttcccaatataaaaatgtcaggaaaattagacatccactatattccagacactgttgcaggcactgagaatacagcatggaacaaaataaggcttctgccctcatctgtgcttatattctaatggaaaaaagcactaggaaataataaattaacgaatgaatgtcggcaccttttggggggaataagccatttatggtggcagggagtgtttcaggtggagaaggagggtgatagtggctgttttctaagacagcaagggatgtgaagggacagccaggcatcaggcaagaagcatgcagtagacaaagggaagggcaaacacaaggcccagaggctggcgtggctggggcaaatatggaggaagagtgggaggatgaggtcagagaggctgccacagggaagaagggcttcaaagccactgctgagacttgggcctttactcccagtgagagggaaagcagaggagtgacacgatccaacccacagttttaaaggaccatgctggcagcttgctacatggtactttaaaaaagcagttctaatgaagctactaataatttctaggacaagagaatgcagggagacgttattagtagtagtagtctatttactaactgactactgctagccagaggagaactagtggctgcagcagcagaggtggcaagaagtggttggcttcgagatcttttctgaaggttccgctgatagtcgggaactgctgacagattgaatgcaggtgtaggagaaagaggactcaaaaatacctgcaaatgaagaatggaattaatatttagggatgtgacaaagactataggaagattggcttccgcaaggactgcggtgtgggaatttggttttggtcattttttcttcctttttgggggtcttttttggttttagtcacttttgagatgcccactacagatccaactggagttggcagctggataccagggtctggagtccagctccaagctgaagataaaaatctggtatttttatcttcaaataaaatcaaagtattaatggcatttcaagccatggaatcagatgaaatctaggactcagtgcagatcaatgaagtccaaggactgggtgtcgggggcactttaacatgtataggtcaagaggaggagaagcagcacaggatcacaaaaggagcaacaagtgagaagcagagccaggcatgacagggaccactctgtggagggagttaccaactcaggcaaggactataggtgcccagtaagcaaatacttttattttatgagtctaaactcgtggaaaggatgggctattgctgatctgtgagccttgctcagaaacaacagagaacttctaaatggacacaatgtcttaaaacacgcacttgtgaggaagacggggctttgctttaagaaacagatggcagagggcaatatcaggaacgagagagagagagactgactcgcaggccagaaaagacaaatgtaagttaaaattatggagtgggaggtgatgggaataggttagttaatttgagaaggcaagccttcagagcgcttataggatctgtgttaaaaaaatttttttaaactaatagattggttaaatctctggatgggagtaatacagatgatctgagtaggaaaacgaagtggaattcctgaggactactgtgcaaggctttgtgccttctactttcgtgagtattcacagaaatgatgcaatcaggctctgagaaaatggaattgggattctgctccaagatgggcagcatcacttccccaagggatttacccagcactgaaatcaacaggaagagtcaccttatgtggtttcactggatcaacacatgggaaaagaagcacttactacagattctggtaccaaacataaataaggaggtggggggtgaggggacaatttatgatcaagataaaacatactggaaaactgctaaaataagaaatgtatttaaaggggaaaagatttcaagaatgatttccagttgtatttaaagcggaaactcctaatcataacacgatgccactaaggtgagaagcgcgacacccaccaccaccagcaccaccacaatgcattccaaatcaccagtgctaccgttgctggggggaaggataactttcaaaagtattttttccccaaacgtttacagtgaacctatttacttataatcagaaaaaaactgaaaaccttaatactttaacacatttcaaaagaaagcagcattgattcatagaaaatgggctacgttcacataaccatgcctgttctatgccagtgatggcccctcaacaaatgtcaatgcccttctctttccaggctctttatgagattataaattgttgagtgacttttgagaaattgtgtccaatttgagaactctgattccaatccatttttacttaaacacaggcattttttgcttaatatcctaaaaacaaactaagattaaaaaaaaaatctgtcaaaaaagttaaaacactgattctgaatgactagaaagaatgttaacgtaattcctgtgacattaccgagaaccctctagccagttgacatgctgaacttgtctgcaaacagtttatcttagagaaattatccagtggcagggaaacaatccccaagtggttgaaaaagaaaagtcaatacacatttttaaaaagtaggttctggctgggtgtggtggctcacgcctgtaatcccaacacttagggaggccgaagcaggtggattccttgagcccaggagttcaagaccagcctgggcaacatggtcagaccccagtctctaccaaaaaaaaaaaaaaaaaaaaattagtcgggtgtggtggtgcgtgcttgtagtcccaggtactcaggaggctgaggtgggaggatggcttgagtccaggagattgcaccactgcactctagcctaggtgatagagcaagactctgtctcaaagaaataataaaaagcaggttctagcctgttagaggactttcataaatctttatttagaaaggcaaagaaaacatttttcaagtgatttagttataatttggtaagaaaacaatccagtacaccactggttaacagtgagtgagattacaatggagaatgacatcacaagcaatatttacctgctacatgttcaacttttcaaaataaacatctgtgacttttgtaacaaaatattaaagatacttacacaaaggaaagggaaacagcttggcagcttcccaccacagggcctttgcacttggggtgccgccacactgctcctcagtccctgcccaaccccacttctccagctatatagatttccttgttatacattttaacccttaacgtttctcagcatggtgcttattacaaccatactcactactctgtgtaattatctggtaacacctgccttccctactagctaagacacacttttttttttttttttttttgagacaaactctcactctgttgcccaggctggagtgcagtggctcaatctcagctcactgcaacccctgcctcccgggttcaagcgattctcctgcctcagcctcctgagtagctgggattacaggcgcgcaccactatgcccggctaatttttgtatttttagtagacacggggtttcaccatgttggttgggctggtcttgaactcttgacctcgtgatttgcccacctcggcctcccaaagtactgggattacaggcgtaagccactgcacctggctttatttccatgttttggccgaataatcctgctgtgaacgtgggtgtacaaaatacctgtttgagtacccgctttaattcttttgacgatatacccagaagtagaattgccgggtcatatggtaattctatgctaaactttttctttttagatggagtcttgctctgtcacccaggctgtagtgcagtggcacgatctcagctcactgcaacctccgcctcctgggttccagggattctcctgcctcagcctcctgagtagctgggattacaggtgtgtgccatcacacccagctaatttttgtatttttaggagagacgaggtttcaccatgttggtcaggctggtctcgaactcctgacctcgtgatctgcctgcctcggcctcccaaagtgctgggattacaggcgtgaggcaccgcacccggccccatacactttcatatcattagaatccagcacaagaccagacataggtccattcatatcaccttccctttctattctcaaaccaactgctacacataagcagaatcggtttttagttttctcctaaatgtgaaatcacaaaaggacttgacatcaaagaattccaaatcggtctttatcaatggctattccaaagccgtctgcaatcaatattgcaataactaaggctccacggaatcctatggtatcaatcccagcgatgaggccaataaaagaagccctgcaaagctatcagaagcatttgtgaccaatattccatcataacaccattaacactgcttgacagggcaatttctcagttgctaatttgttagaaaactaccacgaattcacgttcatacctgtaaccttaaaacttgctcctataaacattgttgtctcacctgagaagctaggtgacttgtcagagtagttcaacggggtgttagtattatgaaaagagaaaggcctcagggttttcatttccctgaattcacaattatgcttctacctaaggcagagcctttactttaaaattagagctgtcacgctaattcaaatggtaatcaggtatctagaaccatcaactccatagcaaagaatacgtctctatactcctaaaataattacaaatgtccatgatattatcattcctactttccttctctagctttcatagggtcaagcttggatgcattttgcttcacccaattcaacagctttcccaagtaccctcaggtggtaatgccctcactcaggccaccaagagaatagcgtctgaagctgagcagtttacctaccaccaaggtagaatgcttcacccactgccctttcagaataaaacgatggccacagacaccatcactaagttttgaaaaagactaaacttgttgagctaacagctctaaagcagactgtagtatggtggaaaacggcccccaaagacatcggctcctaatctctggagcctgtgaatgctaccttataaggaaaatggtctttgaagatgttataaaaaattttgagataaaagagattatcctagattatctgggtaagccttaaatgccactcaaatgactttataagaggcagagggagatttgacacctcacaaagtacagaaggtgaagcagactggagtgatgtggccacaggtgagggaatgctgcagcccaccagaggctggaagaagcaaagagcagcttccctccacagccctgccaacgccttgactttggcccagtgaaactgatgttgaacttctggcctcgaaaaccgtgagagaataaatttccggttttttttttttttttttttttttgacacagagtctcacatgttgcctaggctggaggcagtggtgcgatctcagctcactgtaacctccacctcccagattccagcaatttctcctgcctcagcctcctgagtagctgggattataggcacctgctgccacgccaggctaatttttgtatttttagtagagatggggtttcgccatgttggccaggatggtctcgaactcttgacctcaagtgatccgcccaccttggcctcccaaagtgctgggattacaggtgtgagccaccgtgcccagcccatttctgttgttttaagccgctaagtttatggaatttgttacagtgaccacataacagagattatgaaaaactaaaccaaagtagaaacgctttacagttaccacactccaaaaatacataaaattccaacatgtcacaggaaaaaagattttaaacaacttttaaaacagtgtatttaaaacaagttttaaaagactgggcaacaaagtgagaccctcatctctaccaaaaaaaaaaacaaaaaaaacaagtagccagttgtgctgctgcgcaacttcagtccctgctactcaggaggctgaggctgaaggatcatgggagtccaggaggtagaggctgcagtgagctatgatcatgccactgcactccagcctgggtgacagagtgagacctcacctttaaaaacataaataaataaaaagtttaaatcatacactatccttcaactgaaggtataaaatgcagctactgagttatatagattttgaaaatagagccagcctcttaattacacctctgattactcacacacttgctaggccagataaccatgatcttcctgaatagcattgtaattgaacatttttctatttatattaaaacttacaataaaaactgaaactattagaatttctcattgagcaaaacattttaaggagcaaactatccactactggtaagtttatgatcagacattcgcaattctttttttttttttttcagacggagtctcactctgtccaccaggctggagtgcagtggcatgatctcagctcactgcaagctccacctcccgggttcaagccattctcctgcctcagcctcctgagtacctgggactacagacacccgccaccacaattagctaactttttgtatttttagtacagacagggtttcaccgtgttaggcaggatggtctcaatctcctgacctcgagatccacccacctcggcctcccaaagtgctgggattacaggcgtgagccaccgcgcccggccagacgttcgcaattcttagacttacttatttggctactgatctacagccagacatgtaagaaactcctaattgccttatcacagaaaatactgcttcattcttaaatatcacattcaatacgtatttacgacgagggatgtcatgtaagaaagacttcatgtcttcatctcagtagttattttaaaacaaaggttttcactgatggggttgttgagggaaagtcctcaaaaaaacttccagaagaaaacaaaaaatgcctgcttcccccatctctccacatttgatccatctgcttacctagcagtgcctagaaataaaatcaaggatgctttctttgttactgttttctctaggactcaaacagccattcacggttctagaaacagatgccacctagtgtcaaatgactgtaagtacagcctttacagcccacagtttctgtcagaagttacaagaagtacatcaaagatttttactgggcaaggacaagtgtgaggaaaagcttccaaaaggtggttcttgggctggacgttagaggccactttgagtttgccagctggtgggctttgcagaggcagcccgcacagggattaaggatgtggctctgcagtcaaagcacctgtcccaccctagcttcatccttaccccagcagtgtgagcagacgagttatttaacttcaccgatgccccaccagtacaatgaaaagaaggcctccctaggtttggcacaagatattttaaatgagcacaaactgctaacaaattaaggtctccccttccaagtaactaaggcaaaagtaaagcaggccagaaacattcttcacaaaactttaatcaagtagaaatttcccttctattccccaccataactcacacatgaaaaaaaaaatctcatcacctcacccatttaaaaaagaacaaatgtgcaaaagaataattatgacacaaggctgagcaccagttctgctttccctacagttcccaaagagaaggaatgtaacttctggctgcaacacgcatgattaaaaatcatgccaagcagcagggcacagtggctcacgtctgtaatcccagcactttgggaggctgaggcgggcggatcacgaggtcaggagatcgagaccatcctggctaacacggtgaaaccccgtctccactaaaaatacaaaaaattagccgggcatggtggcggctgaggcaggagaatggtgtgaacctgggaggcggagcttgcagtgagccaagattgcgccactgcactccagcctcggcgacagagcgagactccgtttcaaaaaaaaaaaaaaaatcatgccaagctacatctcccatcctaaacattcagagggaccacagactggactacagagcttcttacaacacagtttagtttgtggtgtacctggtcaaacagattattttcacaccctataaaagaagatacaaacatcactgccctttaacacacactcaatactatcatccccattttacaaatgagaacaaaactcagagaattagaaaaaaaactgaagtgaagtccaggctgagagactgtgtactgttaatatcacacaaaaaagcaacacaggccaggcacggtggctcacgcctgtaatcccagcactttgggaggccgaggtgggcggatcacgaggtcaagaattcgagaccagcctggcgaacatagtgaaaatccatttctactaaaaatacaaaaattagccaggcatggtggcacctgcccgtagtcccagctactcgggaggctgaggcaggagaatcgcttgaacccaggaggcagaggttgtggtgaaccaagatcgtgccactgcactccagcttgggcaacagagtgagactccatctcaaaaaaaaaaaaaaaacaaaccaaaaaacaacacagaataatgacccaaacaaattttttatttttttagacgctgtctcgctctattgcccaggctggagtgcagtggcacgatctctgctcactgcaacctctgcctcccaggttcaaggaattctctgtctcagcctcccgagtagcaggaattacaggtgcccaccaccacgcccagctaatttttgtattttcagtagagacagcgtttcaccatgttggccaggatggtcttgaactcctgaccacgtgattcacctgtctcggcctcccaaagtgctgaggttacaggcgtgagccatcacgcctggccccaaacaaatttttaaacacacttcgcccaagccaggcacggtggctcacgcctgtaatcccagcactttaggaggccgaggcgggagggtcacgaggtcaggagttcaagaccagcctggccaacatggtgaaaccccgtctctactaaaaatacaaaagttagctaggcgtggtggcatgtggctgtaatcccagctactcgggaggctgaggcaggagaattgcatgaaccgggacctgggaggtggaggttgcaatgagccaagatcgcgccactgcactccagcctgggcaacagagtgagactctgtctccaaacaaacaaacaaaaaaaccactgtgccccatatttgaagagtaaaactctagagcaaaatagacatcgttcctgactgcatagaggtcagagcatactatgggaagagatgtaagtaagtatgtggttatcaatctgatgcgagctgtaagaaaaacaaacaggatgttaggagagagactaatgtaagaatggacttgagatgggatgatcagggaaatataaatcaaaattgtaaatataaaaacaagaccagacatggcagctcatcctataatcccagcactttgggaggccaaggcgagatgattgcttgggcccaggagactaaggctgcagtgaactgggattatgccactgctctccagcctgggaggctacaagaccctgtctcaaaaacaaacaaacaaaaaataccttttttgggtcaaaagccctcctggtacttatttatatgcaccaaacaaatatttgctttaaaccctccaggaccctgaatgacgtctggttttgtttcctttccaagggggaaagtgaaggggggtttcctatggtgccactggctcactggctgaaggatcaagcccccttttacttctcagtgaggaaagctgcagcttcctaaaatcagattggttttcttactaaaaatatctatttctccatatgatgcaacataaacattgcctcgaaaataaaaatactcctcagagaccattaaaatgtatcatacatttcaaccgtgttatacaaatcagacaggcaaaacaattcatcgggccgacctagaatccactcagttcaacaaacttatgaagaacctcccagagctgccaggcactgttcgtggtgctggaatactggtcatgtccagggaacactagagggcgtatgagagcttctactttcaggaaaatcagtcgttgagtcagggaagaaaaccaaacagatgcataaggggaaaaaaagttaacagggtagaaaagtacagactaggaagcagaatgacccttcactgaatgggccttttgcgtaaggcctgagaagcaagccgagtgccattagagatgtgctgaccaggcattcctataaaggtggcacaaggtagaaacacaggtgtcacaacacacacattcggtttctactggttcccctaacatgcaggactcgggattcgctagctcagcaaccctatcaggtgaaacaggtattagcactacaacaaggaggctaaagctcagaaacaaattgctttcctaaactcaaagtgctactaagtggtaagggtgggtctaaaaccttcatctttaaactgcagtctggggtttactccagtgcttgagccacgtgtaccacctagaggtttatcaccagcaaatgatccccggatctaggtactgttttctttccccctttttttttttttttaagagacggagtcttgctctgtcgcccaggctggagtgcagtggagccatctctgctcactgcaacctccaactcccgggttcacaccattctcctgcctcaacctccggagtagctgggactacaggctaatttttgtatttttagtagagacggggtttcaccgtgttagccaagatgatctcaattcctgacctcgtgatccacccgcctcggcctcccaaagtgctgggattacaggcgtgagccaccgtacccggccggtactgttttctttagtgtgctattacaacagacaaactaagacagcttatagaaatgcaactggcattgtaggagtcatacaggcccccaatcaagctttggggggggggacactgataccctagtctctcaattctaaaacccaactgattaactatctcataatgacatttcaaaaaaaggaggtaaaactacatgaaacatgcagatgaactaaggtgattagagagatgtcaaaatatgattaaaataattattaggagaaaataggatggcagtgaagtgtaaaagatgaagcattaatacaattttggattggaagtgacctcagagtcgttttgtagacggagtctaggccctatcaatgacttatacaaacagtgatagagcagagaatggaataagaattgattcttattccatggtccttcaactattcctaaaattacacttctatacagcagtcatcatttgacatacggccctagaagatggcctggtgttcaagtctgtctcattcggagaccggctagccccaaatcaaccccatccagacacataatggatcaccccctgcatttacttaacatgcagtattgtagctaacagggtgatggagcggagggaggacacatggtccctatcgtcaaaagtgtgaggaagattcttaaccatcagagcgttctaaggctgacatagtcggggaactcctgaccacggagaaggattttgccaatggagagatttgccaatgtaaagctcatacatggtacacagaaacacgaaataatgggaccacggcgatttatctgaaaggatttgctctgtaagccatgggaagggcattcctgtggacagggagctgcttagatgccacacacacaaatctctttatcacacaacctggccacgaacccaggccctataaacccacaaactgataatcaggtaaaggaaaatcagattcaacctcctttttaaataacccaagagaaaaatcaccaacatcccccacccactaaattctctgctgaaagacacgcagacaccgggacacttccttcacacgcgtctctccctgtcagagtccgctaccctccatccacctccaccttccccactactgtcccctggcatttgctgcgagaataaaaagttcactgcatgagcagttcagggtgtttgggaaagcagatgaaaataaaggcgcgagagcacttggaaatgatcatggataaagaatcaagccctaccctactctcttattgaagaaatatctaccatattcccttcactctccagctcagtttttaaaatataattatgtttgtaaacaacattaaagtggatttattttgaaaaactaatacaaactattaagcttgacaacttggagattaataaattaacccattcattaagggtctatgagcacctactctgtacctgcccgtgggcggacgagataacaagagactcaaaaactcacgagtaaccaccccaacggctgtgtgtgtgaaggtttcaccaggaagcaacattctcacggggcctttctgaaggacaagagtgtacggggtggagaaaaggggtggaggaatgccgggcagggcacggccgacagggaccaggtatgggaagctattggagccagagcttgggagagggaccagaatgtcgaatgtttagagattacaaagtgaaaaatgggctggagttcccacacaagccgggattagagcgtttgtggactctaacctgggaatataaggcgctccaagagggacagggccacacctctggttcaaattgctaaaccttcagatacacaataaatctgtatttacagcaagcggcaatttatgtatttcaacatgcacacattatctgtaattatttcaggtaaaaatggtttcctcctcttttgaaaatacttctttttactactaattatcaatattataggcgtgttctcaatattaaagactaaaggaaaaaagttatagctggcaactgcttcctctaaagatcctacacagcaaagttcagacctgtatggccatcctcaactacactttatatcaaactggtttaaatcgaaaaaggtccacatcacaaagaaccacaatcaatcaaattaattcacctgccctctattctaaggaaaactccccccactccaggtaaatttcatttggcaaattcttaaaaattaacttcaaagaacacatgttcacctccccagtattccgaaagttccaccacttaataaatcgttaagttactgttccagacccgggtccaataaacccaaatagactgaatttctcagcacccaacttgtttctatcttaatccagcaagttgcatcgagttgtcattgttcctccttccaaggcggaggtgacaacggtgcacatcatccgcgaatacgtggaaggacagacacacaccaggggacgcagggagagcggataaagcacaaaggggacgcagcggccgcggggtcgccgggccacggccaggggcgccgtcggggaggagggtgggctgcaggacgagctcgggagggctccgaaatgcgctcgggccaaaacaaaaacaaaaagttcagcgcggcagtgggagcagattgggcgagacggttcacggctgcccattggagaaaagggaaaacagagtcccccaatcgcgagcggcggggctgctcccctcgtgcggccgcgggcccggccccgacgctgcccggcggccgctaccgctcccttccggccgcggccaccactgcaggccccgcgccggccccgcaccggcccggccgcagccccgccccccgcgcccggccgcttgcgcccggccccggccccacccgccctggccccggagccctgcgaccggcctgggcccgcggtcccccacgtccctgcccgccccgtcaccgaggccgccccccgcacaccctcgccggcgcccgcccctcccccgactcaccgcctgcgccgccccgctcctcctcggggcgcgtcccaggccccgctgcccggccgctgcgatgcggggccgcgccgccgggccccgcgtcccagtcccccccagaaaattaatcaccaaaaataattccagagaaaaatggagagtaaaatccaagatggcggcgcgggccgcagcaccgctcgctccctccgctgacgggaaaaatgagtccccgcagcgtccgagccccccgcccccaaccggccgccgccgccgccgtcgcgccccccgcgcccccggcctcggctcgctgcgcccccggcgcccgcccccgcgccccgccacccggggcctcacctcgcctcgcgcacggccgcccgtacgaaaaccgtccgccggcttcaggactccgcgtcccaggtccgtgcgccgcgcggtgccgcctccggttcccgggcgtcctcacctcatcgccccgctgccctgccgcccgcaccgccgccgcgtcgccgcccccggtgagccgcctggaccccgcccgggcacggtggaaggatacgaaaagaaggccgcggcctcgacggcggagggacaccgtgcggcgcagctgccacagtgtgcgcgcgcctcccgccaggcccagccgccgcggcgcttccacggggctctgtgcgggacgcgggcacgcgcggggagcgagttctgtgccgggcgctcccgacggcggagggacaaagggcgattcagagcgagccgtcgcctcccctcgtggcggagggattcgcggccggccggtaggcggctgggatccctccgccctcgctgccctttaaatcgcggctgaggcggcgtcgcccgcgccccgcgggcgccacgttagggtcccctgcggcccttacgcgaccgcattccggtcccggtccccgcgggaccgcggcagctgtcccgggccctgggtctttgcacacctgcccctaccagggacggctctagagccagcctctcggactgcagccctggggaaggggacccccccccctcccgccgcgcgtcccagttgctccgagggaggtggccccgggcagacgagcgtttttgttgtgggaatgggggtcactggcagcagatgcaccctaagaccgtgtgggcaggctgagcgttcctgcgcggagcatgcgagggaggaggagagcgggcgcgccttggcctggccccccgcgggccccgccgcccccagcacccactatgtgccccgcgccgtgctccgctccactccgggtgtgccctgcgcgctggccgtgcgatccctcctcggggatcccgggctggcggggagatcctgagggaccgggccgcctgcgagccggggagctgcgaagcttgcctgggcatcgatcttgtagtccagacaacagaacgatgagcgcgctcccggcccctgcggggctgcccagggtctccgcgcatcctccctctcacgcgtcaggacgacccccggaggtgggggccatgtgggtgccactttacacctagggaaactgaggcacagggagttccgtgacctctatgacaactagtcagggcttgagccagagccctctttcagcattcgggtgaaaaatgcagaataaatcaggaagcgggtgcggaggacctccaagaagttgaggttggcataggcgtgcacatgcctggaacttggtgccggcaggtgcccaaggaagcgcagacctggagtgtgaattggagcgtgttggggaaagggggtgcctaggatatgggcgggtagtgggaccagccagtgtcaaagccctgggaggggagagaggctgcccttgccacagagaggaggcgggcagggcaggcagctcagtcagatgccaggaagagccgcagcctgccttagttttcccctgcggctccagggccatcatcctccacaaaggatgatgaatcgaggctgtggacgaccacccaacacaagaactggactaagtccaagtaacactgacgcacagcgcctccctcgtttgccctcattctcgaccttgactttggctggtagacatgatgctcattaccgccttccacagagggaaactgaggcacggtgactcgctgagggcacatggctgacggaggcagaagcgggtctcatcttcaaaacagagctcctcccactgccttcacctgccctatcagcagcttcctccttttggaggccgattcgggtgtgggcggtgggcacagcccaagcacttctcctgtctgccctttcactaaaagcagcgtcatctgtggcagcagaatccactctgccacgttcgtctttgcagacgcaactaacaaatgattgctttggtgttcttggtttctggtttatcagaaactttccaagattttcgtagtgcctggctccaaatactcaacttgcaccccagaaacactgagcctgcctttgccacccaccaccaccgaatgcctatgggaggcgagctcactaggggaataccatctgcctctaagtcgaccttggtctcaggtcccaagtccagctatgcctgagcagccctccagagcccccaaagccgatgtcctgcccactcccagctttccagagcccaccccagcatagaggtgctctccatgtgcccttcagggtgaacgccaaatcctgagtcctgtgaagcccccatacttccaagatgcagacacttccatgtgttcactgcctgatgccaagtcaagtgttctggacatttccttgcaaggctgggcccacagcctggcagggatacagatgagcaaacccaagcccagcctgctcccaggcccccagttctgtgtgcattcctccctcaatccccctacgttgccagctgctcttccagcctcagctgagaggcccagggtgggccagggctcctggcagagctgaattggggttcaggaccttggtggagccatgcagggggcttgaggcctttgggggtccccactcagggaagccagggctaggctgggctgagagcacagcccaggagagcccttcctagggagactcccacaggagaggccagttggaggctcctcctgccagctggcaggggagggagagcaggaagtaggcagccaggcacctgcccagtcctgtgtgtcaggagcctttggcatttacactgggagagctctaggcaccccaaagtggaagagctgagccacagaggctggggggcctccccagcctggccggaccaaaagggattaacagctctaaagaaagaccgagtcagcggaaggggcccggctggccccggaagcaccgtgaggctggccaggagtgccagcctagcccggagctggcctaggagtggcacgcttgccagggcactgactgaggccatggagtctattttggtctctctagcaggtctggctctggtgtgtccaggggcactccagcctagtgccacccaccctgctatgctctctcgctccctttcctcgagtgccaggttcactcagtgacaggatggcagggattcacttgctttgatcctgtgcttactgggatggcccacaggtcacgttgaccccagaattccaggctggaggcaggttgcttttcattgtaaagcgatatgttggctttcgtgctccgcacatgcgtctgccccagtccccaccccgcccggaagctaggactcctctgatgggagcaggtgtctgaaaccggagggagagtggggcgtacccggctttcccagtggcccctctgggcggctggcgggtttcctggtcacattcctgagcaccactacccccggcaccattcttgctttccacctgcccctccactgccactgtccttgaatagaagaagaaacagccactgaagccgggcgtggtggctcacgcctgtaatcccagcgctttgggaggccaaggtgggcatatcacctgagctcaggagtttgagaacaatctggccaacatggtgaaaccccgtctctactaaaaatacaaaaataactggacgtggtggcgcatgcctgtaatcccagctactcaggaggctgaggcaggagaatggcttgaacccggaaggtagaagttgcagtgagccgagatcatgccagtacactccagcctgttttttgagactctgtctcaaaaaaaagaaaaaagaaaaagaaacagccactgaaaggtcaagtgacacacacgagacccctggtcaacagcagcaagactgtacagcagctgccaacagaggttggcacgagtctgacctgggtttgaatcctagctctgcagtttaccagccatgggatttgggacaaatgatgtagcctgtcagcccaccattcctttacctgtgaaaatgtccattccttggacctgtcttagtaagttcctctatagctttacaattgtttatgtgcttcagatgctcaaattctctctccagcctggacttctctgaacttcagacaacactacttcgatgcttaataggcatttcaaatataacacggctaacctgggggacacacgaaagcaaaaccctctcctcacacacccttccacctcttcaaacaggtaccgttccaccactcaggtccaggtccaggacatagttttctttttttttttctttctttctttttttttctttttttttttttttttttttttgagacggagtttcactcttgtcgcccaggctggagtacagtggtgcactgtcggctcactgccacctccacctcccaggttcaagcagttctcctgcctcagcctcctgagtagctgggattacaggcgtgtgccaccgcgcccggctaacgtttgtatttttagtagagatggagttttgccatgttagctaggccagtctcgaactcctgatctcaggtgatccgcctgccttggcctcccaaagtgctgggattacaggcgtgagcctccatgcccggccaagacctagttttcattcttcctttgtggcttcagggttctttctccttagcacatacgacagctctagcattctgtatctttcagtattcatcctagggctgactctccttttagactatcagcttctcaagggcagggagctttgtctgtctcattcattgctgtgtcttcagcatctggaaccacccctggggacagagtgttgaggcttctatgcttttgctgaagggagggagggaggaagagggaaagataatactaactttccagggttgctacaaggataaagggaggtgcaaggggctctgtaatcactccccaaattctgggggctcaatcttgctttgttgacaaggcttctccaccacccaccccacaagatgtgtagcgttccagctcacgggtgccctgggggttgtgtgctcagcacccacctggggcagtgggacaggcaccaagaaaatttccctgtcactgaggatgttgttcctttgggatcccatcacacaccttttcatctcccctcccccaaataaaactcagccctaaccagccctctctagaagcaaacacagagaggactgacagcagctggcaaaggtttcctcatgggcacggggagctttgtttttttattattactattattttttaataatttctggccaggtgtggtggttcacacttgtaatcccagcactttgagaggccgaggtgggcggatcacttgaggtcaggagtttgagaccagcttggccaacatggagaaaccccctctctaccaaaaatacaaaaactagctaggtgtggtggcatgtgcctgtagttccagctacttgggaggctgaggcacaagaatcgcttgaactcaggaggcagaggttgcggtgaaccgagatcatgccactgcactccagcctgggtgacagagcgagactccatctcaaaaaaaaaaaaaagaaacaaaatcaaaaaaatgagatgttacaactgaagcagttttgatttaacccattatgggtgatgtccacttgggttacccgtcatgtggtttaggggtgtccaggcttccccatcgtcaggtcacttgcttgcccattgtcataaataagttttctgtggagaggttcactgaggggatgtgaacatcattcctcaccacattttatatatatatacacacacacacacacacacacacacacacacacacatatatatatatatattctggtatatatatatatattctggtttatatatatatattctggtatatatatatattctggtatatatatattctggtatatatatatgtgtatatatatgtatatatatgtatatatatatgtgtatatatgtatatatgtatatatatatgtgtgtgtatatatgtatatatgtgtatatgtgtatatatatgtgtatatatatgtatatatgtatatatatatgtgtatatatatatatcagaatggatttttgggttcctagttttgttcatttggtgtctgttccttcctctctcctcttcttcttccaccctttctttcttcctcttctctttctctatttatttctctctttccctcccactctctttatttcctcctttacagttatttgtggtagctttatttatagtagctgtaaactggaaacaacccaaatgccaaccaccaaaagaatgggtagacaaattgtggtctctccatgtgatagaatcctgttcagaaataaaaaggaacggaccactgttacaaacaccatagatgaatttcagaaacattacattgagacaaagacgtcagaaaccatagagtaaaaattgctgggttccaacaatgaggtcgtggaagagaaaaatcccctaatctatggtgatagaagtccaaggggtcattagcttctggcagctgggattgcccatgaggggacatgagaaactgtggtgagatggaaatctctgtttctgagggctgattgccagggtgtgtatgttgtgaaaattctcaaactgtaaatctaagttctttttttttcttttctttgagatagagtctcactcttccacccaggctggaatacagtggtgtgatctcactccctgcagcctcgacctctctgggcttaggtgatcctcccatttcagccacctcagtagctgggactgcaggcactcaccaccacacccagctaattttttttttttttggagatggtgtcttgctctgttgcccaagctggagtgcagtggcacaatctcagctcactgcgacctctgcctcccaggttcaagtgatccttctgcctcagcccccctagtagctgggattacaggtacgtgccaccatgcccggctaatttttatatttttagtagagacggggtttcgccatgttgtccagcctggtctcaaactcctgacctcagatgatccacctgcctcagccttccaaagtgctgggattacaggcgtgagccactgtgcccagcaacacccagctaatttttttgaaatttttttgtagagatggggtttcaccatgttgtccaggctggtcttgaactcctgagctcaagcaatccccccgcctcggcctcccaaagctctgtgattacaggcgtgagccaaatctaaaatctgtgcaaatcactgctgcaaattatgcactcaaaaaagagggaaataatctggagaaatgctactgctcaatgaaaacttcagtttttctatgacttatcttgacaagcaaattctataaaatagttttttctcgggtgtttcccagacattgcttctgagaagacccaggttcatggtacaggttccaggtttaaggtgcagatgaggaacctgaagaatcttgttccttcagccgaagcactgttggtgccaattattgctgcagatatttaaagggaggaggcgagctagtcgtggtggctcacgcctgtaatcccagcactttgggaggccgaggcaggtggatcgcatgaggcgaggagtttgagaccagcctggccaacatggcgaaaccccgactctactaaaaaatacacacacacacacacacacacacacacacacacacacacacacacacaaactagctaggcatggtggtgtacacctgtaatcccagctactcaggaggctgatgcaggagaattgcttgaatctgggaggcggtggttgcagcgagccgagatcgcaccattggactccagtctgggtgacagagtgagactcagtctcaataaataaataaataaataaaaaagggaggaagagaaactgtccctgcttctaatagacgtgctggaaccttctaccagcatgcgagcctccctgctgcaggcccctccagtcacctcccagctgctgcctggtctgtgctgatctggaagcctccagccaatgctgagttgacctgggtcttctctggccggggtatgtgtggtttatgtggaatcagccaattttgctctgtctcataatcattcccttacattacgcctcatagacacactttggggtattggcttgtcccttgataaattccaaggggtggcatttcctgagccaaaagtccagatggttttcctctagggcattctgggtggccatgcagagagggtgactgggggcctcagccctgcatgctcagtgcacagggcttcccaggcgggggccattagagacctagaagctccctcaccatggggactgagggacttaggctgtctctccatatggtggtcaatgggtgtcaacttgactgggccatgggacacccagatagctgcgtaaacaagatttctgggcatgtctgtgagggtgtctccggaagagattagcctttgaatcgggtggactgagtcaagcagatgcccgtcccccccagtgtggggggcctcatccaacccactgggggctcaaatagaacactaggacttcaacatatgaatttggggaggggagggcacaaacattcagtctatagcagaaagggaaaggggagagaaagagtagagtttaatttttaaaccctccctggaagtgagaaaaattaattacagcaaagaagagaaagccaagagttaaaattccaaatctaaacaggctgccaggggttaggcaggggaagtgctggacacagggcccgtgctagaaaagcacagttattggccgggcacggtggctcacgcctgtaatcccagcactttgggaagccgaggagggtggatcacgaggtcaggagatcgagaccatcctggctaaaacggtgaaatcccatctctactaaaaatacaaaaaattagctgggtgtggtggcgggcacctgtagtcccagctactcgggaggctgagtcaggagaatggcatgaacctgggaggcggaggcggaggcggaggttgcagtgagccaagatcacgcccctgcactctagcctggccaacagtgcaagaaaaaaacaaaacaaaacagaaaagcacagttattgtggccaccccatcaggggttctctgactctcaaaaccaggccctttccatggggaccagttgctgctgggggcaggagaggcagaagtccctggcccctggcctctggcccctgttacaccttctgcctcctgtgtttccttcttattccttctgggaacagagtttctaataataaaatatatcttaaaggcaaaggtactccggtaggagagggaccagggcttggttcaggcctgcattctgcaaacaattgctttcttaataaaaataacaggccaggcgaggtggctcacacctgtaatcccagcactttgggaggccaaggcgggtggatcacctgaggtcaggagttggtgaccagcctgactaatatggtgaaacctcatctctactaaaaatacaaaaattagccaggcgtggtgatgcatgcctgtaatcccagatactcgggaggctgaggcaggagaatcacttgaacccgggaggcggaggttgtggtgagccgagatcacgccattgcactccagcctgggcaacaggagcaaaactctgtctcaaaaaaaaagaaaaaagaaaaataataacgccacacacacacatgttcgtattgtttttcacaacagccaaaaggtgtacacaacccaagtgcccatcagtggatgaggcgtaaacaaaatacaatacacccaaagcatggaagagtattcagccttaaaaaggaagggaattccaacatgtgctacaacgtggaagcatcttgaggacattaggctgagtgaaatgagccagacatagagcacgaaaccgtgtgattgctcttatgtgaggtatgtagggtagtcgtattcacagaaacagaaagtagaatggtgggtgccaggggctggggaggaggaaatggagagttgtttaatggggacagtttcaattttgtaagatgaaaagagttgtgtggataaagtaatgatgactgtagctcaactatgtgaatgtgcttaataccactgaactatacacttaaaaatgattgaggccaggcacggtggctcatgcctgtaatgccagcactttgggaggcagagacaggcagatcacttgaggttaggagttccagaccagcctggccaacatgatgaaaccccatctctactaaaaatacaaaaattagctgggcgtggtggcgggcacctgtagtctcagctactcgagagactgaagtgggagaatcacttgaacctggggcgggtggaggttgcagtgagccgagatcacaccactgcatgccagcctgggtgataaagtgagactccatctcaaaaaaaaaaaaaaaaaaagactgagatgacaaattttacattatgtgcattttcgcatagttttttttttttaaaaaaacaaaacagcagccagttcactgaatttccaccatgtgccatgactgggtaaggctctgatagagaacattgtgatctgcatttatagatggggaaactgaggctcggagtggcttacccagggccacacagccttagtggcagagctagtgcgctgacccctctgttgtgcggctgaggtgtgagagtgccccccggcgctgcatgagccgccagggctatgactccaacctcctttgaaggaggacactcttagaatctcatctgggacctcaatttttagcatattctgtcctcttgttgcagaagatggggtccttttattttattttacttttttgagggacggagtctcactctgttggccaggctggagtgcagtggtaccacctcagctcactgcaacctccacccccgcagattcaagcaatttttgtatttttagtggagatggggttccgccacgttggccaggctggtctcgaactcctaacctcaggcaatccgcccatctcggcctcccaaagtgctgagattataggcgtgagccgccgagccctgccagatggggtccttttaaatgctgtcctgggggctttctggccattgcattcttttgtgagttaagagtcggctgctgagtctgccgtccagtctttggcgtcagctcactactgccatgctctccaccatcctggtggctactgttgcctccatgccactcaggtgcaggagcagctcaggcccgtgcacctttcccacctatgtgccacctcaacacgtgagcatcttagcattgtgacgctacagcgggctgcagcgatcgccactttgctcctcagcagcaggcacccggtgaccctctggctggcaaatgagcccttcttaagggactgcttcctaggcccacctctgataccagctgtctcaggctgggtcctctagaagcagaccccgagaatatgatttgacaatgagtcctttatttgagaagtgatcccaggaagcaccagttggggagcaggtgagacggggatggggaagaagccagaagagatggtgcattcataatccggttactgctgcaggctcaattctgctgggatcctccaggcaactgtgaggatgtgcttcagtgttctccaactgaggcaagagagctggggtattgatccaccacttctgccagtcatgggattagggaagctccctgggattgcaggcttgtgcagccagggagtgccctcgagttaaggcacagatgcttacagctggaagggttgggggcatggaatagtgggggctgaagggaagtggatgggcattgtcaatgtctgcaataaagcagaaaaactactgttaaacttctttacatttagagccctactcttctgaacccttctcaactcagtcatcgacatccataatttttcaatccacactctttctgccatcatgaatgttgatggtacagcatttctcaagagtgattgttccaggctgggttcccaggaggctgactctgaggcagaggacatgcaggaagttggttagaggctgctcttgggatcaacgcctttggaagagaatggaatggaggcaagcaggactgggctgagggagaagctggcctgggatgccagcccccgtggggagctctgaagatgaggtagcccttgcacttccatgccaggctgtcctgggaagggagcatgtcatggggtgggcagcctgcatcagctgaggccgtccctgaagggggccacctgccaaaagcattgcagcagctggccaatgggcctcccactcctaagggtgaatgtgagcagtgcaggagagcatccgccacagtcctcccctttactgcttggatctgcttctccacgtccaggatggccgctcccttttctgcccggggaccttctctggccacaagggagcaggcacaacccagccttgcccaggaggtgatgctgtgggcagccgacagataacccatcagcttcacctctgtgggatgactcctgggtgagttccatgtggttcctcaggcagtcactggcaggagagagccctactcacccccagtggcgagacctacttgttaaagcactttctggaactttctcctcccctgcctagttcctcacttcctggaatacctgcttgccctcgaacccttgttgcagggtctgcttttgagggaactccaaccaagatgggcccaatgcagacgaagaggctgaaaataaaggagagtgtgcagggaggagcagggtccccaggaggcctaggaggctgacggcgttgggcgttcagagggagagctgcgttaggcaggaggggcaagggtgtcacttgcggggtaaacatggacacttctgggggtgggccgcaggtggatgaggaagttgctttctgattgcatctggtttctctgtgaggaaggaggcgaggtgagagtgagggtggctgaggaggagataaacaacttgaggagagtggagaaggccccgacggagaaggagagagcagcctaggaaaatggagacgcccttcccaaagggttgggagtcaggggcctgggggaccgtgagcttctggaaccagctgcaccaccgtgagaccgtctccgtcaacactcagcatccctgtggaggggctgcatgcagagagggttggactagacacctttcatggggtctgcccgattcactaccttttcatctctaccaaccatgccctcagcctccacaggggttatttctggtacaactctgctcccaagcccaggggtggtcattggatccaagtttagctaatccctgtcccagggagagtcttgttctcaatttcaaccaacattactatgcccctgtggtgagctgggccctgggaaaacagcggtggataacagacaagacccctgtcctcatggagcatacagcccaagaggggtgatgcacaataaccaaataaacaaagagtccaaagaattaggggtcgagcatggtgggtcacacctgtaatcccagcactttgggaggctgaagtgggcagatcacctgaggtcaggagttcaagaccagtctggccaacatgatgaaatcccatctctactaaaaacacaaaaattagccgggcatggtggtgtgcacctgtaatcccagctactcgggaggctgaggcaggagaatcacttgaatccgggaggcagagcttgcagtgagctgagatcacaccactgcactccagcctgggtgacagagcgagactctgtctcaaaaacaaacaaaaacaaaaacaaaataacaaaagaattagggactgtgacaaggaggatgagagaagtaagctggctgccgagacggtgaatggcacctccattagatggagtggctgatgtcaaactctccaagcagatgacacgcaagctgagacctaacaggtgagaaagaccgaggcatgccaaggacttgagtcaaagtatcccaagcagaaggacgagtaaatgcagaggtgagaaagagattggtgtgttctcctggggagtgccaggagaccgcgggtgctggagcatggtgagcaagaaatgaagttggagaaaaggcagaagctggaacacgtgggagcctctcagtttttgctaaagactttggattttattccaagtataacaagaagccaggagtgacacagtcctgtttttggggtaatgttttatttttgtataattccaaacttacagaaaaaaagactagtataagaaactcccatatatacattattcaaattcgccaactatttacactctccctcttcacagtagttacacagttgctgcaaatactggatcattgcttttaggggaagacagggtcaggttcctgtgagcctccggctacaacattttcatcgactgatcaatacatgaccttttcaaaaaaaaagtgtgcttttgtttaaagacaccttatttataggccgggcgcggtggctcacgcctgtaatcccagcactttgggaggccgaggcgggcggatcacgaggtcaggagatcgagaccatcctggctaacacggtgaaaccctgtctctactaaaaatacaaaaaaattggccgggcgtggtggggcgtgcctgtagtcccagctattcgggaggctgaggcaggagaatggcgtgaacccaggcggcggagcttgcagtgagccgagatagagccattgcactccagcctgggcgacagagcgagactccgtctcaaaaaaaaaaaaaaaaagacaccttatttatttattattattattatttgagacagagtctcactctgtcgcccaggctggagtgcagtgtcaccatcttgactcactgcaacccccatctcctggattcaagtgattctcttgcctcagcctcctgagtaggtgggattacaggtgtgtgccacaacaccagctaatttttgtatttttagtagagacagggtttcgctatgttggccaggctggtctcgaactcccgacctcaggtgatccacatgcctcggcctcccaaagtgctgagattacaggtgtgagcccctgtgcccggcctaaatacaccttatttaatacatattgttgatccattgacattgaccccacgtggccgtgggggtcaatgagcgctaaaactctgcctgaatgaagcttatctaactcgggcattttctcccaaaggcacgcatagccttctcgatcatgggaacactagacagcctcagcactgcacgggggccattttgaatggtgaaatcaccaacaagaagcacaaaactgtgaaaaacatgacactaaatagactgtgaaaaggacacttgtttacgggtcggagagctgaaacagggagatgagtgctgactgcttcacctcagcgggtgactttagtctctggagacatcaatttttcaccactctgtgtatgcaccggctttcaaatacccacagaaaggcccaagtattgattttggggttacaaataaatttagctagaggtgaacccacaaatacagaatccaagaataatgaagatgatttgaatcgtgaggttatgttagaaacaccccacctctgcacccctgagtacttcagtgtatatttccaaaatggttgttctcttacataatcacttttgtagttgtcagaatctggaaactcaccagcaatacaatactataatttgatacatgcttttcccccagtccagcagccagtccaagatcacaggatgtgtttagttgtcctgtcttttggtgcctcagtcttgctttgctttttgtggtcttgacttgcagaatgtccttctgtgtgtgttatctgatgtttccttgtgagtagattcaagttgtgcgtttgtggcaagaatatccaggggtgatgtcttctcagtgcataaggagagatgtactgctgttattttgctatttgtcctctgtttgcttcctagcttttctggacctcatttcctgcattacaagctttttggtgtgtttggtttttttttttaatagaaaaatgtttgaatttcttctcattttcttctgtgtatattctacagctattttctttgttattacaatgggtattacatttaacatctgtattagtccattctcatgctgctaacaaagacatacccgagactgggtaatttataaaggaaagaggcttaattgactcacacttcaccatggctggggaggcctcaggaaacttacagtcatgggtggaaggggaagcaaacatgtccttcttcacatgccaacagtaaggagaagtgctgagcaaaagggggaaagtccccttataaaaccatcagatctcatgagaactcactcactatcatgagaacagcaactttgaggtaatgacccccatgattcaattactttccaccaggcccctcccatgacaaatggggattgtaggaactacaattcaagatgatatttgggtggggacacagccaaaccatatcaacatcctaaagttataacactctggtttgaatttataccaggtcaacttcagtatcgtataaaaactctgctctttttacagctccatctctttttcttatggttgttgatgtcataaaattatatctttaaacattctatgccccaaaacataaactgacaatgatttttaaaaagttagtgtcttaaattatacagcaaacaaaatgtgtagttacaaaccagttacagtaatactagcgttggattagttcttggtttaactaatcaattaattaatttattattatactgacttttaatttattttatttacttatttatttattttgagatggagtctgtctcactcttgtcacccaggctggagtgcagtggcccgatcttggctcacagaaacctccgcctcccaggttcaagcgattttcctgccttagcctcccaagtagctgggattacaggcacccaccaccatgcctggctaatttttgtatttttagtagagacaggattttaccatgttggccaggctggtcttgaactcctgacctcagatgatctgcctgcctcggcctccaaaagtgctgagattacagatgtgagccactgcacccggccgatactgattgttttttaaagtgtaatagtctcttaaattctgcagaaaaccaaaagtagttttacaacctactgttacaatagtactagcttttataattgcacatatatttgcctctattgagatctttacttcttcatacagtttcatgttactatctagtgtcctttcgtttcaccttcaggactcccttaagcatatcttgcagagcaggtttactggttatgaacttcttgagttttcttcttcgctttttttttctttttctttcttctttttgttcagagacagggcctcactctgtcacccaggatggagtacagtagcatgatcacagttcactgcaacctcaacctcctgggctcaagcaatcctcctccctcagcctcctgagtagctaggattacaaacatgcatcacaacgcctgacctttgattttgtagagatagggtctcactatgttgcccaggctggtctcaaaatcctggactcaagtgatcttcctgccttgtcctccaaagtattgggattataggtatgagctattgtacctggcccctttggcttttcttatatttttcttttatcttcttaaaaatattatttatgggttgggtatggtggctcatgcctgtaatcctaacactctgagaggccaaagtgggcagattgcttgagcccaggagttggagaccaccctggacaacatggagaaaccccactctacaaaaaagaaaaaaaaaattagctgggcttggtgcatgtctgtagtcccagctgtagtcctcaggaggctgagatgggaggatcacttgagcccaggaggctgaggctgtagtgagctgtgatcatgccgctccactacaacctgggcgacacagcaagaccttgtctcaaaaaattttatattattgattcctttcttttacaaacccttatcttgagggctgactttaaatagatcacagtgagggagatactctgctatgtacaaaatcctgacccagaagcaggttgtctatgaatggtttagtaccaggttctccgtgaatgtgcactccatgatgggccagcggggacagcccatttctggccataccccatttcacgggttgaggagttctctgtactggactccggtcctggcaccagatgaggcactggcagcacggtaaaggaccagctatctgaggccaaccaaggctctgcagtgctatcatatcattctgccttctgcctgggcggagttttgatttagaggcattcagtcataatctcacggatggaagctttgctgcattggcttttcagccaagcacatattcttcacttttgaaagacagttttatccaatataggattcttggttgacaggttttttgtttttgtttttgtttgtttattttttatttttttgagaccgagtctcactctgtctccaggctggagtgcaatgacatgatctcagctcactgcaacctctgcctcctgggttcaagcgattctcctgcctcagcctcctgggtagctgggattacaggtgcacaccaccaagccctgctaatttttgtatttttagtagatggcattttgccatgttggccgggatggtctcaatctcttgacctcgtgatctgccctcctcagcctcccaaagtgctgggattacaggcgtgagtcaccatgcccggctgtttttttttttcttttaatagtttgaaaatgtcttgggaggccgaggcaggcagatcacaaggtcaggagattgagaccatcctggctaacatggtgaaaccccatctctactaaagatacaaaaatttagccaggcgtggtaatgggcgcctgtattcccagctactcagaaggctgaggcaggagaatggcatgaacctgggaggtggagcttgcagtgagccgagatcaagccattgcactccagcctgggcgacagagcgagactctgtctcaaaaaaaaagaaagaacaaaaaagaaaatgtcagcccactgtcttctggcctgaaaaatttctaatgagaaatctgttgaaaatcttatttaagatcttggtatgtcacatgtctcttctctcttgctactttcagcattctctctttgtctttcaaaagtttaattattattaattattattattattattattttgagaaggagttttgctcttgttgcccaggctggagtgcaatggtggaatctcgactcactgcaacctccacctcccaggttcaagcaattctcctgcctctgcctcctgagtagctggaattacaggcatgctccaccatgcccggctaattttttatttttagtagagacagagtttctccatgttggtcaggctagtctcaaactcctgacctcaggtgatccacctgccttggcctcccaaaatgctgggattacaggcatgagccgccgcacctggcctcaaaagtttaattgtaacgtgtcttggtgtgactccttctctctcttaattttaatatttaatttaattttatttatttatttatttatttttgagacagagtctttttgtgtcacccaggctggagtgcagtggcgtgatcttggctcactgcaacctccacctactgggttcaagcgattctcctacctcagtctcctgagtagctgggactgtgggcgcgtgccaccacacctggctaatttttgtacttttagtaaagatggggtttcgccatgttgtccaagctggtcgcgaactcctgacctcaggtgatccacccgcctcggcgtcccagagtgctgggattacaggtgtgagccactgtgcccagccaattgaatttaatttttgagacagggtcttactctgtcacctaggctggagtgcagtggcacaatcatagctcactgtagctttgacctcctgggctcaagcaatcctctcacctcagcttcccaagtagctgggactataggtgtgtgccatctacatctgactaattattttattttttgtagaaacaaggtctcactatgttgcccaagctggtctcaaactcttcagctcaagtgattcttcttctgcctcaccctcccaaaggcatgagccactgattctctctctctctctctctctttggaaacagagtctcactttatcacccaggctggggtgcagtggtgtgatcatagctcactgtagccttgaactcctgggctcaagtgatcctcccacctcagcctcccaagtagctagctaggactacaggtatgcaccacaatgcacagttaatttgtttgtttgtttgtttgtttgtttgtttatatgtttgtttgttagagacagggttttgccatattgcccaggcttgtctcaaactcctgggctcaagccaacctcctgcttcgtcctcccagagcactgggattataggcatgagccactgcatttggttggatctctttgaattcatcttacatgaagttcattaagcttcttgcatgtttcttttcatctctttcatcaaatttcggatatttatggacattaatttttcaaatattctccctgcttctttctcttctctttctgtgactcccacagtgcctatgttggtctacttgatggtatcccaaggtcccttaagctctgttcatttttcttcagtcttttttttttctttctttctgttctttagacttgatcatttccattaccctatcttcaagttcactgattctttcttctgcctgcttaaacctgcctttgaatctgccctctacttatttttcatttcagttgtacttttcagctctggaaatttttttggtttcttttagattttatttttactgatatttccatttcgttcacacatcattctcttgacttactccataccctcctgtagttttctgagcatctttaagacagttgctttaaagcctttttctagtacacctgccataagctctttttcagggacagtttctgtttatttgtggttttctttaaccttcgaataggctatatttttctgtttctttgtatgccttttgatgttttgttgagcattggacaattgaatttcataattgtaactggaaatcatattctcccccttatccagggtttactggtttttgttactatttttgttttttgtttatttgattgattgttgtagcctatctctgtgtcaagaatcagcctggaatgtaaacttaaggtcttctcaggtattttctgagccttgggtacgtgtggtcacttactcattttcctcatatatgcagttttaaaaaaatgttccaggccaggcgcagtggctcacgcctgtaaacccagcactttgggaggccgaggcgggcggatcatgaggtcaggagatcgagaccatcctggccaacatggtgaaaccctgtctctactaaaaatacaaaaataaaatttgctgggcatggtggcgcgcgcctgtagtcccagctactccagagcctgaggcaggagaattgcttgaacctgggaggtggaggttgcagtgagccgagatcgcaccaatgcactccagcctggcgatagagtgagactccatctaaaaagtaaaaaataaataaataaagttttaaaagttctagtgtttaatgtctggctcccaaagggaaataaaaagaaaaatgaaggtggaaggaaagtgcatcagccctttaaatgccccagaagtgacttcagccagagggggaggagcttgcaacaactggaggagatgcagcaacagtggccacctgcgcctctgtgattaggagcaccgctgtgggccaggcacggtggctcacgcctgtaatcccagcactacggaaggctgaggtgggtggatcacttgaggtccggagtttgagactagcctggccaacatggcgaaatcccatctctactaaaaatacaaaaactagctgggcgtggtggtgcacgccggtagtcccagctactcaggaggctgaggcaggagaatcgcttgaacccgggaggtggaggttgcagtgagccgagatcacaccactgcactccagcctgggcgacagagtaagactccctctcaaaaagaaaaaaaaggaagcacctctgagatcagaagcagcactcagcagtgagagcacagatccctggtatttggaggacaggactctttttgcccacgccggctcctgcaagctgtgtgcaggttgctccaggaacacatgcacagctgcgtgccatagggctgggggtcagggatgggtagtagccattgtgggaagagctaaaatggactgaaatttactgtaatttaccagtccaagccttccccctggaagccacaagtcttcaatacactgcagagttctaaaatagttacaccagacagattctgccatgcaattgttgtctaggtggggagacagattcctggtgcttcctaccatgctatcttcccagattcctctctgaataggtgacttataaatttttttttccagtcagtgtcttatcatttcattttcttaacagtgtcttttacagagcaaaaattttggtgaaaacattttgatgaggtctatttcatcaattttttcctttagagaccatgattctggtgtcatagttgtattcttttcctaaaagcctccacctcccgagttcaagctattctcctgcctcagcctctgagtacctgggattacaggcgtgcatcaccatgcatggctaatttttgtattcttagtagagatggggtttcaccttattgaccaggctggtctcgaactcctgacctcaagtgatctgcccaccttggcctcccaaagtgctaagattacaggcatgagccaccgtgcctggcctcttactttttcttctaagagtttcattgttttgttttgtatttaagtctgtgctccatatttcgttaatatttatataaagcttaaggtatagattgaggatctttgtcttcttcttcctttttttgcatactgatgtctagttgcaccatctgttgaaaggttatctttttttttttttttttttggagacggagtctcgctctgtcgcccaggctgtagtgcagtggcgcgatctcggctcactgcaagcacggcctcctgggttcacgccattctcctgcctcagcctcctgagtagctgggactacaggtgcctgccaccacgcccggctaattttttgtgtgtgtttttttgtttgtttgtttgtttttctttttttttttagcagagacagggtttcactgtgttagccaggatggtctcgatctcctgatctcatgatccgcccgcctcggcctcccaaagtgctgagattacaggcatgagccaccatgcccggactattctttcttaattgacttaccttttcatgttttttttaaaagcccaagtagtgtctgtgagttctccaatcttctttttctttttcaaatttaactattccatatcctctgtctttccatataagatttaaaattagcttgttaatatctacaaaaatattctgctgagattttgattggaattgaatgaaatctgtagatcaatttgcagagaattttttttttttttttgagacagagtctctgctgcccaggctggagtgcagtggtgcaatctcggctcactgcgagctccgcctcccaggttcacaccattctcttgactcagcctcccgagtagctgagactacaggtgcccgccaccacgcccggctaattttttgtatttttagtagagacagggtttcaccgtgttagccaggatggtctcgatctcctgacctcgtgatccgcccacctcggcctcccaaagtgctgagattacaggcgggagccaccacgcccggccgagaattgtcatcttaactatgtgtgtgtgtgtgtgtgtgtgtgtgtgtgtgtgtgtgtgtgtgtgtgtatctcaagtattccaaaccatgaacacagtatgtctatctgttacttgggtcttgtttgatttatttcatcagcattttgtagtttgcagctttcaatcctatatatacgttgttagattcaaacctaagtagtaagacttttgggagctctgggactggttttgtcattgttttccattactagtgatccctgagggagaggaagcaaatgagatgagccctaatgatggccccatcttactgtctgaagagtttgcagcctgcagcgcaaagaaggaagagctgaggagcagcccggaagctttcctgaagtgaggagatggagctggaggtctgggaggcccagactggagttcacagggcaaagttctagaaagaaaagagtgcaggggaaggagagaaattgagattgtaccctgaagatttagagtcgtaattaatctgagtgccaatcagtgcatacatgtgaggaaaatgctgaggctggggaaggaacctcccaaaaggatcagtggaaacaatcatggcagctcacgtagggccaggaatatttttcctttcccaacttcagagtggaaaccttgtggggcattgagtaaagtactcagaagggttctacctcagtagtggggaaaatgagccctagactaaatgtcgctctggttctacctaacacaacacgaccagaaagactcaaactcttttcaaagaatttaactgtgtcccagaacaaaattcaagataatttatatgaatacaaaaatatcatacaacaaaataattttcaaaactagcacaaatgatgtattgcagccagtaaaaagttgccaggcatgcaaagaagcaagaaactgggagccatcatgaaaagaaaatgttaaatcaattgaaactagaaatgagccagaaatgacacagatgacagtgttagtagacaaggacattaaaatagttattataggctgggcgcggtggctcacgcctgtaatcccagcactttgggagaccaaggtaggtggatcacaaggtcaagagattgagaccatcctggccaacatggtgaaaccccgtttctactaaaaatacaaaaattagctgggtgtggtggtgcctgcttatagtcccagctactcgggaggctgaggcaggagaattgcttgaacctgggaggcagaggttgcagtgagccgagatcatgccactgcactccagcctggcaacagagcgagactgtctcaaaaaaaaaaaaaagttattataactgtattccatatgctaaggaaagtaaaggaaaaattaagaatgttaagtaaagacacagaaatatattttaaatacccaacgtgaacttcaagatattaaaattacaatgtttgagatgaaacatatattgaataggattaacagcagataagacatggcagaagaaggctgggcgtggtggctcacgcctgtaatcccagcactttgggaggccaaggcgagcggatcatgaggtcaggagatcaagaccatcctggctaacacagtgaaaccccgtctctactaaaaaaaaatacaaaaaattagccaggcatggtggcagatgcctgtagccccagctactcaggaggctgaggcaggagaatggcgtgaacccaggaggtggagcttgcagtgagcctagatcgtgccactgcactccaacctgggcaacagagcaagactctgtctcaaaaaaaaaaaaaaaaaaaagacatggcagaagaaaaagttagggaactaagatgtcaaagaaagtgcttcaggcagaaggaaaatgaggccagagaaaagctggaaatacacaaaggaatgcagagcactggaaatggaaactacatggataaatatacatgtatttttttcttattcattacacttatttatcaagtaattttttgactttgtaaattggcaatttataattgtatacatttgtgaagtacaaagtgatgttatgatttatgaatgcaatgtggaaaaattaaatcaagctagttagcgtatgcatcacctcaaatacttaacattttttttgtggtaagaacatttacgttttattctcttagcaattttgaaatataaaatattctattattaaatatattcaccatgctgtgtaatagaactaagaaaaccccatatttttcctctaactgagattttgtacacttcatctccccattctccacagtcccagtctctgtaaccagcctctccgcttctatgagttcaattgttttagattccatacataagtgagaacatgtggcatttgtctttccatgtctggcttatttcacttagcataatgttgtccagttccattcatattgttacaaataacagaatttccttcttttgaatgactgaatagtattccacagtatatatacaccacattttctttgttcatttgttgatggacagttagggtaatttctttctttctttctttcttttttttttttggagacagagttttgctctgtcacccaggctggagtgcagtggtgcagtctcggctcactgcaacctttgcctcctgggttcaagcaattctcatgctttagcttcccagtagctgggattacaggtgtgcaccaccatacccagctaatttttttgtattttagtagagacggggtttcagcatgttgctcaggctggtctcgaactcctgaactcaggcaatccacccaccctggcctctcagagtgctgggattacaggtgtgagccaccacaccaggccagggtgatttcataaactactgtgaatagtgctgcaatgaacatgtaggtgcagacatcccttcaataaactgatttcaaatcttctgggtaaatacccagaagccattgctagatcaggtaagtgattgtttaagcaaaaataataagaatttgctgtggagttcatataaaagtaaatgcatgacaatagcctaaagactggaaaggaaaaaatggaaatatactattgtaagttttgttttgttttgagacagggtctcacttgttgcccaggctggagtgcagtggcacaatcacagctcactgcagctttgactcctgggctcaagcaatcttccttcctcagcctctgaagtagctgggactactggtgtgcaccaccatgcccagctatttttgtattttttgtagagatggggttttgccacattgcccaggccagtcttgaacttctgggatcaagcaatccctttgctttggcctcccaaagcactgggattacaggcacatattagtctgttctcacactgctatcaagatctacctgagactgtgtaatttataaagaaaagaggtttaattgactcactcttccacaggttgtaccagaagcatggctggggaggcctcaggaaatttacaataatggcagaagggcaaatgggaagcaagcatgtcttcacctggcaggatagtaatcaaagggaaatgctacatgctttcaaacaaccagatcttgtgagagctcactatcatgagtacagcaagggagaaatctgcccccatgatccaatcacctcccaccaggtccctccctcaacaatggggattactattcaacatgagatttgggtggggacacagagccaaagtatatcaaggcatgaaccaccacgcccagcctattgtaagttttttatactatacatgaagtggtatcatagcacttaaaggtagactttgataagttaaagatgtatgctataaagcaaccactgaaacacaaatccaaagagttttagctaaaaagccaacaaaggagattaaatggaattctaagaaataattaatgccagaaaagctggctgggcacagtggctgatgcctgtaatcccagcactttgggaggttgaggcaggcagatcacttgagctcaggagtttgagaccagcctgggcaacatggcgaaaccctgtctgtactaaaaatagcatggcatgttggtgtgtgcctgcggtcccacctactcaggaggctgaggtgggaggatctcttgaccctgaaaggttgaggctgcagtgagccatgattgtgtcactgcactccagcctaggtgacagagcaaaatcctgactcatgaaaaaaaaaaaaaaagaaagaattaatgccaaaaaaggcagaaaaaagtaaaaatggaacaaagaagagatgggacaaatacggcacaaatagtaatatgttaagacttaaacataaccgtataataatcacatttaaatttaaatggtctgaacactcccaattaaaaggtaaaaatttttaaattgtattttaaaagtggccaagctgtatactatataaaaaattaactttacctttttttttttttttttttaagacggagtctccctctgttgcccaggctggagtacagtggctccatcttggctcactgcaaacttcaccacctgggctcaagcaattctcctgcctcagcctcctgagtagctaagattacaggtatgcactaccatgcctggctaatttttgtatttttagtggagacagggttccaccatgttgatcaggttgatctcgaactcctgacctcaagtgatctgcctgcctcggcctcccaaactgctgggattacaggcgtcagccactgaacctagcctcaactttactttttttgtctttcacgaaggtggtgtcttgttatattgtccagactcatctcgaaatcctgggctcaagcaactctcctgcctcaacctcccaaagtgctgggattataggcatgagccagcattgcacctggcctgaaatccacttcaaatataaagacacgcatagattaaaagcaaaaagatgaaaaagatacactatgttaacactagccaaaaaaaatctgaagtggctatattaatatcagacataataagtttcagggtaaaaaaaattaccagatacaaaaagattattttataatgaaaaacaggtcaattcattgaggagacatagcaatcctaaatgtttatgcatccaaaaacagagcttcaaaatacataaagcaagaagagaaagaattagcagaagaaattaacaatccacaattttagctagagatttaaaaacccttagtcaataactgatagaacaagtagcagaaaatcaagctaatcaattaattaatcaaaaataattatttaagatcaagaaaattaatcaaaaataattgattaatcaaaaaataattattaaaaatcaggccaggcatggtggctcatgcttataattccagcacttttggaggcaggtggaccacttgaggtcaggagttcgagaccagcctgaccaacatggcgaaaccccatctccactaaaaatataaaaagtagccagctgtggtggcaggcacctgtaatcccagctacttgagaggctgaggcaggagaattgtttgaacccgaaaggcagagagaggctgcagtgagccaagattgggccactgcactccagcctgggcgacagagtgagactccgtctcaaaagaaaaaataattattattatttaagatcaataaaatttctaaatctctagccacactgatcaggagaaaaagaagacacaaattaccaacttcaggcataaaagaggtgactcactatagcatccacagacaataaaagagtggtaaggggaaaccgtaaataatttaccaataaatttgacaacttagatgaagtggacaaattccttgaaaaacacaaaaactcacacaagaagaaatagatagcttaagtagccatatgtcaattagataaattgaacttgtagttaaatttcccacaaataaaaactaggcccagatggcttcactagtgaattctatcaaatattgagaaataaaaacaccatttctatacaaaatctttccaacttattttctgaggtcttaattaccctgatactgaaaccagatgacaacataacagggagaaaaaacccacaacttccaactaacatccctcatgaacattgatgcaaacatccttaatttatttagcaaatcaaacccaataatatatttgaaggataacatatcatcactaggttttattattctaggaatgcaggattggtttaacattacaaaattaatgtaatttaccataataacaaacctaaaaaagaaaaattatatcatctcaatagatgcacaagaaacagttgacagttggcagtattcattacaaaaacactcagtggctgggtgtggtggcttacacctgtaatcccagcactttgggaagctgaggtgggaggatcactttgaggccaggagttcaagaccagcctgggcaacatagggagatacccccacccccatctccaaataatttaaaaaagtattaaaaaattaaataattatttaattattaaaaataattatataattattaaaaataattaaataattaaatatatatatatttttgagacagagtcttgctctgtcacccaggcaggctgctggagtatagtggcacaatctctgctcactgcaacctctgcctcccaggttcaagcaattctcctgtctcagcctcctgagtagctgggactacaggcgtatgccaccatgcccggctaatttttgtatttttagtagagacggagttccaccacattggtcaggctggtctcgaactcctgacctcaggtgatccacccgtctcggcctcccaaagtgctgggattacagacgtgagccaccctgcctggcctaattttatttattttttaaaatttgagacagggtctttctctgtcccagactggaatgcagcagtgcaatcatagctcactgtaaccacaaactgctgggttcaggcagtcctctcaccccaaactcccaagtagctgagactacaggagtgcaccaacttgctcagctagtttttttttttttttttttttttttttaagaaatgggatctcactgtgttgcccaggctgttctcaaactcctggcctgagtgatccttctgccttagccttccaaagtactagaactacagtaataagccactgtgactggtctttaacatttttatttactttgtaaaatttttttttcaaacatttagacacaaacacacattagcctaggcctacacagggtcaggatcatcaaaatcactattgtccacctccatgtcttgtcctgctgggaggtcttcagagacaataacatgcatggagttgtcatctcctgtaaacaatgccttcttcttctggaatacctcttgaaggatctgcctgaagctgttttacaagtaacttatgatatggtttggctctgtgtccccacccaaatctcatctcaaattgtaatctccactctccacatgttgagggagggacctggtggaaggtgattggatcataggggcagtttcccccatgctgttcgcacgatagtgagtgagttctcacgaggtctgatggtttaaaagtggcagtttcccctgtgctctctctctctctctcctgctgatatgtaaaacatgccttgcttcccctttgccttccgccatgattgtagatttgctgaggcctcccccgccatgcagaactgtgaatcaattaaacctcttttctttataaattacccagtctctggtagtatctttatagcagtgtgaaaatggactaatacaacattatacatatatatatatatatatatatatatatatatatatgattaatcatacattagaccacaaaacaggtcttctatgtacacacacacacacacacacacatatatgtatgtgaagaagaacattctaacataatgattaatgctatagtacagtaaatacataaaccagtaccatagtcatttattatcattaagtattatatactgtatataattgtatgtgctacactttttgttatttttacataggatcttactctgttgtgcaggctggagtgcagtgacccattcacagctcactgcagcctcaaactcctgggctcaagcaatcctgcttccttagtctcttgtgggactacaggcacatgtcacgactcccagctaatttttccttttttcttttctttttttttttttcatagagatagaatcttgctttgttgtccaggctggtcttgaactcctgggctggtcttgaactcctgttgaccaaaaattttatatctggcaaaattatccttgaagagtgaaggagaacttaagatatttccagttaaacaaaagctgagggaggtcatgactagcagacctgccatatcaaaaatgctaaagggagttacaggcattcagtctgagacgaaggcattaggcagtaagtcaaagccataagaataaacaaagaacgctggtaaaggtaactacttaggtaggtataacagctaggattagtgcattttttatttgtgactccttttttttttctctcttttttttttttttttgagatggagtctcactctgtcacccaggctggagtgcagtggagcgatcttggctcactgcaacctccacctcccaggttcaagggattctcctgcctcagcctcccaagtagctgggattacaggcatgcaccaccacgcccaactaacttttgtatttttagtagagaaaaggtttcactatgttggccaggatggtctcgatctcctgaccttgtgatcggccggcatcggcctcccaacgtgctgggattacaggtgtgagccaccatacctggccttttttttcttatatgatttaagaaaagcatgtacagtcagtcgtggtggctcacacctgtaatcccagcactttgggaggctgaggtgggcggatcacaaggtcaggagctcgagaccatcctggctaacacggtgaaaccccatctctacgaaaaacacaaaaaattagctgggcgtggtggcacgtgcctgtagtcccagctacttgggaggctgaggcaagagaatggtgtgaacccaggaggtggagtttgcagtgagctgagatcgtgccactgcactccaacctgggtgacagaacgagattccatctcaaaaaaaaaaaaaaggaaaagaaaagaaaagcaagtacataaaacataattacaaatctatggataaagatgtaatttgtgataataacaatttaaagggaaggaagaataggaatgtgtgggagcagagtgtgtgtatacttttgaaactaagttggtattttttaaactaagttgttataagtttaagatattaattgtaattctcaaggtaaccaccaacaaaataacttttaaaaaattcagaaaaggaaagaagggaatcaaaattgttttctacaaaaaaattaataaatgcaaaaaaggcactaatggaggaactgaagaacaaaaaatatatgacacagaaaacaaatagcttcatggagaagtaaatccttccttatcaatatttactttaaatataaatgtaataaactctccaattaaaaggtagaaattggcaggttggattttaaaaatcatgatccatctatatcaggggtgttcaatgttttggcttccctgagccacattggaagaagaagaattgacttgggccacacagaaaatacactaacactaagccgatgagctaaaacaaaaaaatcacaaaaaaacctcataatgttttaagaaagtttacaaatttgtattgggccacattcaaggatgtcctgggccacatgtggcccacaggccgtgggttggacaagcttgatctaatgctgtctttatttatttatgtatttattttgagacagagtctcactctgtgtccaggctggagtgcagtggtgtcatctcagctcactgctatctcagcctcccaggttcaagcaattctgccttagcctcccaagtagctgggattacaggctcccaccaccactactatatttttagtagagacaaggtttcaccatgatagccaggctggtctcgaactcctgacctcaagtgatccacctgccttggtctcccaaagtgctgggattacaggtataagccactgtgcttggcctaatgccatctttaaaagattcactttatcttttttttttcttttttactactgccttctcagtttctaaggagattcactttagaaacaaagacacaaagagattgaaagtaaaagggtgaaaaaagatataccgtgaaatagtaagcaaaggagagcaagggtggttattaaactataagtaaaaaaagaaaaaggctatcagagaaaagaataacattatatagtcataaaaatttcaacccagcaagaagatacaacaattataaacatatatgaacctaacaaaaaaagtcccaaaatatgaagcaaaaatggacagaattgaaggggaaaatagatatgtctgcaataatagaaattttagtatctcacttttaataatggatagaatggccagacagaagatcaataaagaaatggaggactggctgggtgtggtggctcatgcctgtaatcccagcactttgggaggccgaggcaggtggatcacctgaagtcaggagttcaagaccagtctggccaacatggcgaaatcacatctctactaaaaatacaaaaattagctggatgtggtggcatgcacctgtaatcccagctactcaggagggtaaggtaggagaatcacttgaacccaggaggtggaggttgcagtgagctgagatcgtgccactgcactccagcctaggaaatagagcaaaactccatctaaaaaaaaaagccgggtggggtggctcatgcctgtaatcccagaactttgggaggctgaagcaggtggatcatgaggtcaggagtttgagaccagcctgaccaacatgttgaaagcccgtctctactaaaaatacaaaaattagctgggcatggtggcgcatgcctgtaattccagctactcaggagtctgaggcaggataattgtttgaacccgggaggcagaggttgcagtgagccgagatggcaccactgcactccagcctgagtgtctgtctcaaaaaaaaaaaaaaaaaaaaaagaagagaggacttaaattatattctcaagcaattagacctaacagatatatactcaatcaacaaaagtggaatatacattcttctcaagtagacatgcaacattctacaagacaaatcatacattaagccaaaaaacaggtcttactaaattttaaaagactgaaataatataaaatatcttttacaaccacagtggaatgaaactagaatgcaataacagaaggaaaactagaaaattcacaaatatatggaaattaaacaatatactcttttattttattttattttatttttgagacagagtttcactgtgttgcccaggctgtagtgtggtggtgggatctcggctcactacaaccttcacctcccagatcgattttcctgcctcagcttcccaagtagctgaaattacaggtgactgccaccacatctagctaatttttgtattttttcagtagagatggagtttcaccatgttggccaggctggtctcaaactcctgacctcaggtgatttgcctgcctcagcctcccaaagtgctgggattacaggtgtgagccaacacaccctaccaaaacagtacactcttaatcaatggattgaagaataaatcacaactcaaacgttgtgattggctccgtgtccccacccaaatctcaccttgaattataagaatccccacgtgtcaagggtgggggatcaggtggaggtaatgagatcatgggggcagtttcccccatgctgttcttatgacagtgagtgagtctcatgagatctgatagttttataagcatctagcatttcccctgcttgcacttctctctcctgctgccatgtgaagaaggatgtgtttgcttccccttcccccatgatcataagtttcctgagatatccccagccatgcagaactgtgagtcaattaaattttgttcctttataaattatccagtctcaggcagttctttacagcagcatgagaacagactataagatgaaaacaaaaacaaaaacaaaaacaaacccaaaaaaccacagcatatcaaaacttaaaagatacaaaaaaggcactgctagaaaagaaatttatagttgtaaatgtctatattaaaaaagaagaaagatctcaaatcaataacctaactgtacgtcttaaagaactagaaaaagaagagcaaacaaaacccaaagctagcagaaggaagaataataaaaattagagctgagatacacaagatagagaatagaaaaatgacagataaaatcagtgcgtattaggttcgtttgagtgcaggggtgtttacgactaactgataacatgcagttatggatttctttgttccttcttttttttttttttttttgagatggaatttcgctcttgttgcccaggctggagtgcagtggcgtgatctcagttcattgcaacctctgcctcccaggttcaagtgattctcctgcctcagcctcccaagtagctgggattacaggcatgcgccaccatgccaggctaattttgtatttttagtagagacggggtttctccatgttggtcaggccagtctcgaactcccgacctcaggtgatccacccgccttggcctcccaaagtgctgggattacaggtgtgagccaccacgctcggcctctttgttccttctttactcccactgcttcacttggactagaaaaagaagaaaaagaaaaaaatcaatgtgtattagggttctccaaaaaacagaagcaaagatagatagaaacatacatacatacagatagatacaaagatagatagatggctacatacatacatatatacagatagatacatacgcagacacatgataggtagatagatagatagatagatagatagatagatagatagataatagattgactatgggaattcactgacatgattatggaagacgagaagttccacaatgtgctgtctgcaaactggggaatgagggaagttgtgatctaattcattctgagttcaaaggcctgaatcagggaagccaatagcgtaactcactaaggccaaaggcctgagaaattgggaaactggtataagtcccagagtctgaaggcctgagaacctggaattctgatgtccaaagcaagagaagacagatgtcccagctccagaagagtgaattcaccattcctctgcctttttgttctatatgggcctaaacaagttgcatggtgtctgatatggtttggctgtgtccccacccaaatctcatcttgaactgtagttcccataatacccacatgtcatgggagggaccatatggagataattggatcatgggggtggtacccccatcctgttctcatcatagtgagttagttcttatgagatctgatggttttataaggggcttctcccttcgctggactctcattcttctcctgctgctgccaagtgaagaaggatgtatttgcttcccctgacccataatggtaagtttcctgaggcttccccagcaatgctgaactgtgagtcaattaagcctctttcctttataaattacccagtctcaggtatgtctttattagcagtgtgagaacggactaatacagtgcctgcccacattggatgtggacagatcttcctcattcagtccggtgattcagatgccaacctccagaagcaccctcacagacacaccgagaaataacactttcccagctatctggatatcccttaactcagtcaagttgacagctaaaattaaccattaaataatgaaatcaaagttgaaaaaaaaatcaacagaatggacaaatctttagctaaactaaccaaaaaaaaagctcagattactaaaatcagaagtgaaaggacaaacattggatgattccacttctatcactccactctatctagaataggcaaatttatgaagacagaaagtagaataaagattaccaggagctgggggtggaggaagcagagagttattgcttaatgggtagagagcttctgtttgggatggtggaaaaagtactggttatacaattaaatactgtgaatgtatttaatgccactgaattgtacacttaaaatggtaaaaatggtaaattttatctgatgtatattttatcacactaataattttaaaagattataaagtctgtcttgcttagtgactctctgccttgctggctttgaagaagcaagctgccctgtcacgagcggcctatggagtgagccacatgacaaggaagtgggtgcagcctccagcctccaaaagccagtgagaagctgaagccctcagtctgcagtcctgcaaggaactgaatgctaccaacaaccatgtgagcgtagaagcagatccttccccaggtgagcctcagatgagactgcagcccttgctgacaccttgattaaagctctgtgagaccctgaattggaagacccagctaagcctcgctcagattcctggctcacagaaactgaggtgataaatgtgggctggtttttttgttttgtttttgatatggagtctcgctctgttgcccaggctggagtgcaggggcacaatcttggttcaccgcaacctccacctcctgggatcaagcaattctcctgcctcagcctccctagcagctggggctacaggcccgtgccaccatgcctggctaatgttttttgtatttttagtagagacagggtttcactgtgttagccaggatggtctcaatctcctgaccttgtgatccgcctgcctcggcctcccaaagtgctgggactacaggtgtgagccaccacgcccagctgtgggctgttttttgaatggctaaatttgtggtaatattgtactgcaataggtaactaatgcaagcagtattgtacggtactatcagcaacttttctttttctttgctcaatagtatgtcttggaaaactactaattttttttttttggagatggagtcttgctctgtcacccaggctggagtgcagtggcgtgatcccagctcactgcaagctctgcctcccgggttcatgccattctcctgcctcagcctcccaagtagctgggactacaggtgcccacaaccatgcccggctaatttttgtatttttagtagagacgaagttttgccatgttagctaggctggtcttcaactcccgacctcaggtgatccacccacctcggcctcccaaagtgctgggattataggcgtgagccaccgtgcctggctgaaaactactaattctgttacatggagctctagctcattcctctgaactgttgttcagtactttgtataagcaccattgaagatgatttggagctttaaaatgttttgccatcacaaataatgtggcccatgatgttctccttagtgcctccatgtgtgctttcataaggaagaaaccaagatgtgtgattgcatctttagtctttttgttttgttttgtttttaattgagacggagtcttgttctgtcacccaggctggagtgcagtggtgtgatctcggctcactacaagctccacctcccggattcaagtgatgcttgtgcctcaccctccagagtagctgggactatagatgcctgctaccatgcacggctaaatttttttgtgtttttagtagagatggggtttcaccatgttggccaggctggtctcaaactactgacctcaggtgatccgcccacctcggcctcccaaagtgctgggattacaggtgtgagccaccgcacccggctgcatctttagctttaatgccactgccaattgccctgcagagtgaagctcccgagtggggccttagagcgccatttttcctgtccctgttgactgcctgtcactgtcaccatctgatttccccactgtaactcctggaaggcaggaagcatttcctttgcatctttgtgtcccagagctcagcccagggcctggcacagatcccaagctatgcacatccttccttctctgtccacatcctccccttttttttgagacagggtcttctctgtcacccaggctagagtgcagtggtgggatcatagctcactgcagcctcaacctgctgggctcaagccatcctcctgccttatcctcccgaggaactgggagtacaggcatgtgccaccatgcctggctagtttttattttttgtagggatggggtcttgctatgttgcccaggctggtcttgaattcctgggcttgaactaacctctgcctcgcctccaaagtgctaggattacaggctgagccactgcgcctggcccacaaccctttctgaacagctgggctgtgacagcccactagggacagccttgtggctacagtggactggatcacagaggacctgggcgttggacaggcagcttaaatgggctgctgttggagccaaggttacaatcagagccccttggggaaagcagagcctaacagcttcgggaggtaggtcctctgcagagaggagcagagatgggcagagagcagagggaaggagaggagcagacgcacggcccccaggaggcccggctctcattctgtctttgcagcaaatccccgtcttgggacggcctgaggtttctgttccttgtagccacaggctccccaagacaaagagctgctccgtgttcgtggacctgttctctggatctttcagatgctgagttggggggtctcccagagattcaggagaaaggccagaggctggggtggagtcttccttcttcatgcatttccacgtatagggcccccggaatctcatgtgctgggcctacccgcctggcgccactccgtggttctctctgctcacctgacgtcttcgtgcctgctgccctcctgctgtgtcctgtccaagcgggcatctctacagtcagcaaagcgggaccaggcccctgccgtgggccctggctcataaaagacagtgagtttttcactctgaagtccagattgcccagcggggctcatcttgtgcttcaagtacattcagcgtgtgcccggagcacgcagcactggtgaagttggggttcaggagtcaggtggactgggcccaccccttaccttgtgtgtgaccttgggcaagtcacctacctcccctgttgtctatttcctcatctgaaagtgggcttagaaatggttcccgccacgtggggaggcggtgaagcactctaccagtcctgtggggaccttccctgtgcttcagactcacggccagtgtctgcctggcatccaataggcatctctgccttcacaacccacagcaggactcttgatttctgggccaccttctctccaaatccttctgtacccccttatcaagagacagtataggccgggcacagtggctcacacctgtaatcccagcactttgggaggctgaggcgggcagatcacttgtggtcgggagtttgaggccagcctggccaacatggtgaaaccctgtctctactaaaaatacaaaaattaagggggcatggtggcaggcgcctgtggtctcagctactctggaggctgaggcaggagaattgcttgatcccaggaggcagaggttgcagtgagccaagattatgacactgcattctagcctgggtgacaaagtgagactctgtctcaaacaaacaaaaaaaagaggcagtatggtctagtggtaaaagcatagaagctggggtcacctaccagcaatgtgacatgtgtaacggtgggcaggttcatgaattccccaggccttagtttcccctctaaacggggggctgatgatgatgacatactatctcgcagggctgtggtgaggatgaaatgaattcacgtgtgaagcactgggaataaaggttcaccctttccctccccccgagaaacgatccctccaccattccaccttctcaaaccaaaaatgcaggggtcaccccggctcctgccgtgggcacgtggatcgtacataaggaagcagtgcacgttctgctgactcagcctccaaagtggcccctagggtcctcggtttctgtccatctgtgtgaacacaccctggtccaagccagcctcctcactccgcggatgaccgagccagccaggcctctctatctgcagccaaagtgatcgtgtacttatgagatagaagttgaaactcttcctcccctcctccctcccttccattcactttttcttttaacttttgggttttttgagacggagtctcactctatcacccaggctggagtgcggtggcgcaatctcggctcactgcaacctccacctcctgggttcaagaaattctcctgcctcagcctcctgagtagctgggattacaggcacctacctgccaccacacccagctaatttttggatttttagtagagatggggttttgccatgttggccaggctggtctcaaactcctgacctcaaatgatccactcaactcggcctcccaaagtgctgggatgacaggcatgagccaccaagcctggcctcttttaacttttgatgatggaaatttctaaacacacacaaacatggagagagtgggaaacagaccccccacttccatgaagccatcagccatgctggatggatggcagccacatgtgtcttgtggcacgattctcttgcccccttctcctgatgtggaagcattttaaagcacacctcagacagcctatgacttcagcctcaagcaacagagtcatcttttaaactctgaactggataacgtgactccctgtgcattcctgggctctcccgctcctcccccgccgctgtcccctgggaccggcctgtctctttcactctccccagggcccttctctcctcacacttgtggccttggatctgtcctgggggctccgcattgctggcctctctgcctggatcccgcatctccctgatttttcatctgtgtttttactgcaaatgtttggattttgtttcctgctcacagcaggaggccatcggggattgctgtgcaggggagtattaggagctgagttgtgtttttaaaatatcctccggctgctgtgtggaggatgagtagggctggggcggggagcaggaagaccatcacagagaattcaacgtagtcgaacgtagtccatattctaaaaagtatcggcttgtgtcagccactgcgctggatcttgaagcaaagctgtagatacggaaattgtggctgagtatggtcgtggtttgtcccaactgacccagctggtgggttttgggaccgaggcccggggggctgcctgtgagttcattgcattctccctgaactcgtggattccttctggtgggagacagttacaggcgcaaatgacctaataccacctagaacaatccatcccatagtggaagccgagcccccctggcctggaacaatcgaagagggccagagttctctggtgtggggtaacggcaagactccctgctgtcaggggagcgggctaaggggtttccacctgcaaacatggaatggtaggcgcagggggccggagggtgggatggtgtctctagccaaggccagcaccagggctggtgaaataggctgggaggggcaggacgtggtggctcacacctgtaatcccagcactttgggaggccgaggcaggaggatcaccttgaggtcaggagttccagaccggtccggccaacatggtgaaaccccgtctctagtaaaatacaaaaacttagctgggcgtagtggcaggcgcctataatgccagctactcaggaggctgagaatcgcttaaacccgggaggcagaggctgcagtgagccaagatgcactccagcctgggcaacaagaatgaaactctgtctcaaaaaaacaaaaaacaagaaggctaggagggagccttgcccgccagggggagcccttggacttcctctaccaagagatgcggccctgctcctagagaaactggctggctcgaggccatgccctgtcgagctcgaggccatgccctgccggggctctcaaggctttggaggagcctctgctccctacggccgtggtgtgctcagccacgcccaacatttgcagacagatccggtgtgaatgctcagctctcacggctttggaggagcctctgctccctgtggccatcgtgtgctcctgagccacgcccaacatttgcagacagatccagtgtgaatgctgtgctgccatttgcttggtggatgacctcggccaagcaacctggcctttctgtgccttggtttcctcactgtgaagggacgagagctccttttggggccaagccccgaattggactctcacttctgtttggccttctggcaccttctgtgtggactctcacccatcagttagggactttgtacctcctgtgtgtcagtgctgtgctaggccccggatgagccactgcccctgccgcaggaacagaaagcctgaggggggctctgagctctctgagctccccagggtggaggaggcaccttctctgagcccacccctcaccttcattgtgttcctcacaaggcaggtctcacccaccgcaccgggggctcctgggccacgtcatctctgaatccccattgggctggcaaacagtaggtgctcactaggcacctgataaagtgagttgaatgggactttgtgtaggccaggatggcacctggcttatcttgcagtctcgtgtcctccaaggcagggagaagaaagcccggagcccctggatttggacaggtctgcgacgggggcgccttgagctctgtttggctgggactcaccacagggggctgcattgggcctgtagtgctgggcagaggagcttggggctttcggcagggacgggtgtggttagatttgtgttttgacgggtcccttgccgcagggtggagaacggatgagccaggctgtctgggagcagagtgggcaggcagttggtggtgggcccaaggccgggcagcagctggggtcaggacaggggaagcggccggagtactgaaacctttaggatggccagttggactcagggggaagcacaggtttctaaatctgttagcccacgtggggatgccattaggtacagggaggacccctggggccaaacacactcctgggggccgatgctgaggttggccttggatgctgagtttgaggcacctgtggtccaggaggaacgccatccaagagagaacaatggcagggggtttggaataggacccccaaggatggagggggagagtgtgaccaatgctctcagaggataaaagaattcggagactgggtgcgatggctcatgcctggaatcccagtggaggccgaggagggtggttcacttgagatcaggagtttgagagcagcctggccaacatggcaaaatcccatctctactaaaaatacaaaaattagccaggcatggtggcatgcacctgtaatcccagctactcgggaggctgaagcaggagaatcgtttgaacccaggaggtagaggctgcactcagccgagatcgtgtcactgcactccagcctgggtgacagagtgagattctgtcaaaaaaaaattgggggccctggctggggcagggggactgactggctgactctgcagatccctgtggcccactccctggatgtaggggtgccaggcagaggccgttagtcacaagctgaaggccagcactgcaggttactcttcatcctacctccccagaaaggaacgaggtgcccacagtctatgagaacaccccccaagccacagctcacacaggcccagggttctggctctcccaggggaggctcaatgagccagggtggagagctgacccttagcaggctggtcctcgcctgggccactggggtgaagtcaggcagaggaaagggcatcctccacagctccgattgtctacccatggtgggcagagctgcccattccgggcagacggtgtcttgtcagattcaaggacaatgctgcgagctggcctagagctcaagatggcaagggagacaagccaggggctggaaccaaccaccttcccagccagcgccagtgcctgtagttaagcatgcagatgcgactccgatgtgtgatggccaggaaaggagacagtcaggcacaagctctgtggagtgtggctgtcagtccagaaggcctgactcaggcagtgaaggctgggagaggggaaggggccagcaggacgtgacaatgagaaagaaaaggctggggaagccggggtgcagtgagggagaagacaggaggagaggactggggggcagcttctgacccattctccccactccatattttcccagcctcggctttgaagttacttcaaatggtttgggagttaccgtcttagccttttatcccaggccctttgacatcctttttggagatgaacttaaataagaagctggccacccaaacctagcccagggagatcttggtgagtgggagacaggagattccggacaaagatcagctctgcctcagcgccaggtggttgagaagccacagccaactccacaaccacttttgggtggggccccatgctgccatgtttacagcagatgctgctctgtctctccccatttcccagaggaagaagccgagctccagaacactctatagcttgctccaggtctcagcagccgcagacctggcctgagaacatggccttacaagatgccctggccacgtgtggcccatcagctcttgctgccttgggcaggtgggcagatgaaggaccaaaggccaagctcaggctgggcaggtggcaaaggaacctagttaaacaaacagctgggactctaggaccagggctcaatcctgactctgggcctccaggagtgactttgctctgtgcctcagtggtcccgtcttcaaaatggagattgtgatgctgatctcctggggctgaggcaatgcagcaggtcacacatgtgcagcaggttacacacacacagtgggttgcactcacgcagcaagttacacacgcacagcacattacacacgcacagatcacacacacgcagcgggtcacacacaggttacacacagtaggttacactcacacagcaggtcatacacagcaggttacactcacacagcaagtcacattcacacagcacagggacagggcaggcatgtaacaagcacagagcaagtgctggctggatgttcaggatgggagcctggaatccaggggaactggcctaaggagcaggctccggggtcgaatcccaggactggccctggggtcctgggttacctggagcaagggacttgcactattcaggactagcaatagtgaccccacctcatgagcagggcaggatcagattctgttctgcgcaggttcaggccgagctggccacaccacgggggtgatgtgttgaatttagctccttcacccctaaggctggctccaggaggttcatcgaacaggtcagaaaaaggattaaagatgctggctgtggcctcctctggggcccaggagcctcccagcaagcaccagggcgggcgtgggtaccagggagaaacccaagtcagtggcaacgacacagtcaacctccagggtgcggagtgatggtgcacattcacagaacaaaaccctgccacgtgcacggcagaaagcaaggctccccaaggagcaggatgcacccacacgattgtggcgagcagtcagtactttaattcaggtcaggctccgacacctggggagacggggtcctgcccgccccaccctgaggtggaacccccagctgctcctgggcacagaatcatttacaaaaataaatatgaaaaaagcagcaactctttagtgatcatggaattaatctgacagcaattaaatgtgtttaagcatctggcatatctcctcaattgcaccaaaagaatttggaagcacttggtttggtctcaaaggcaaaaggaaaggacgaggaaggggccaggcctcccgccaggcccccgcccccctcacatttctgagtccgcatacatcccgttgattaagtagtccacctgggtgtagtccttcttcttgtagctctcataggcctgcagggcaaacaaaaccaagactgtgatgaaaagggtcaccccgagtaacagcaccaccagaaggagagttttgtctaccacggcctgggtgaggggctcagtggtgaccaccatgtactggccttgggtgctgggctggcacgagtccgtggctggcatcttagtgccccctgagctcctgggtgttggcccagtggaatcagtacctggtgtggcttcagtctctacctgctccggtgcctgggatgtgcctggcccagcggccctctgggtatatggcatggggcttggctgtgtcgtgggggacatggcctccatctcagggattgggctggtgtgaggtactggcactgggctggcagttggctccctggcttgtgccttggtggtggtcaccactgtgggggtgggggcgggctctggggttgtgtttgagggcatgggtgtggatttatttgttgtgttaaccacaggctggtccactgacacctggctaatgggaccttgtgcttggggacgcatagggggtacagggcttgccgcggtgtcactgggcatgtgcttggaaggacttggacgagtgctcatggggctgcttgtgtttgctgtggtcgctacagtctgagcacgtgtggccaatgtggccagggttgctgttcttggcaacgcgctgctctttggcacttgtgcgagggctgtgctgagagatggatgcccagtggcggtagtggacggggtccgccctgtggaagtggacgtgggcgcggggagtgcaagtgtcatgggagtgctggaggccgcagtcatactggaggctgcagtcgtgggagcaatggaggccacagttgtactggaggctgcagtcgtgggagcactggaggccacagtcatactggaggccgcagtcgtaatggaggccgcagtcgtactggaggccacagccgtgggagcaatggaggtcacaccatcagctgcacctcctgaagttgctggttcactcacatctgtcctgcttgtgtcctctgttgtgacttccatagagttgaggtgggctgccgaagtccctttggtcaatgtgacaggagaagctgctgccatggttacatcctcagacgttttattatcaactgtttccacagatgcattcctcttgactaatcccttccacattttgttagggacaaagttgccttaaagtcagaaaaaggagaaaaagagagacaatcatgttcaatcctgcacagggggattgctcagggatcggcttccacccaggcctgtggggccccctcctcagcccagccagagtcgggggaggtgatgtgcgaacatgcttcctccccatctctcttcccactgttggcatgcagctcattgaaaaagcccttgtcaatttgattttaaaactcctttgccctctatgaaccccctgcccattgaaggcttcagaccttcactatttgatccaattcccaaaacatcagagtaaaagtctcacacaacaggtgtgattcaccattaaaagcccactgaacgcacacccaggtttacaaagcagataaactgcacaggtattcacatcataaaagaacgcttggctttgtgaaaggattcactgcag

SEQ ID NO: 4 - DNA, 154055 bp, Homo sapiens
ccccttggggtctggccaagggtgtgacccctgggcctctgagccatggggtgacacctgaggccatccacgcctccctggatgtagccaccgtttccggagtcctgcttgtgtgcctgttgcagcttcccttccccagtggctgctcccctgaggcccggctttccgttctcttagtgggtctcgtgcttacccgtgggggccaggcctgccagcacgggaacaatatgactcggtcagagctctggtcagacccctgtgtgtgcctggcaggagccccggcagccgccgccgctactttctgtgtgcacagcaacccctcccagtgttctgtgactcgggtggctcctgtccagatcctagtttgtcctctggagcactcccaggtcctccaggccatgagctgcggccctgatgtctctactccagccacggactgagagtgcataggagtgtccccaaacagcagtcacgatggtcacaaccttggcttccagacagtgagtgctgtccacagacagacccggtgctgtgccatgtgtgtgactcacagcctctcctgtaatctccacaacccctcgaggaggtcgaggttattgtctccatctttataagcactaaaggatgagcctgccagccacaggtcccactgtgagttgtggacactacatttctgggatgggggcatatgagagtccttgccaagcacatttgaaggttttcccagccagcccctcccccagcgggctacccaggaactgagagttaggacgtgcccttgagtttgggctgtgcccccacttgctgtgtagctttggggagcccctcaacctctcggaaccttgtttttctcatccatcaaatggagagaagtagatttaaggcacaggattgcacccaacagtgtaggcattcttggcgatgttgcaggttcggctccagaccatcggggtaaactgagtcacacagctgttttggttttccagtgcatttaaaagttagatttagaccgggcacagtggctcatgcctgtaattccagcactttgagaagccgaggtgggcggatcacttgaggtcaagagttcgagaccagcctggccaacatagtgaaaccccgtctctactaaaaataacaaaacttagccgggcacgttggcaggtccctgtaatctcagctacttgctaggctgaggcacgataatcacttgaaccgggaggtgggggttgcagtgagccaaaattgaaaaaaaaaaaaaaaattagggccggttgcggtggctcacgcctgtaatcccagcactttgggaggccaaggtgggcggatcacaaggtcaggaattcaagaccagcctggccaacatgttgaaaccccgtctctagtaaaaatacaaaaattagccgggtgtggggttgcacacctgtagtcccagctactcaagaggctgaggcaggagaattgcttgaacctgggaggcggaggttgcagtgaactatgattgcaccaccatactccatcctgggccacagagcaagacttcgtctcaaaaaaaaaaaaaggatttacactgtactgtaggctgcgaagtgtctaaaacacaatgtatataccttaattaaaaatactttaggggccaggcacagtggctcacacctgtagtccaagtgctttgggaggtcaaggtgaggggattacttgagcccaggagtttgagaccagcctgggcaacatggcaaaaccccgactctacaacaacaacaaaaaatacaaaaaattagcccctgtaggcccagttacttgggaggttgaggtgggaggatcgcttgagcctgggaggttgaggctgcagtgagctatgagctgcaccactgtactccagcctgggtgacagggcaagactctgtctcaaaaaacaaaaacaacaacaaaaactttattcctaaaaagtgctgacccagagataagaagcaagcacatggttggtaaaatgacatcagtgagcttgctttatgcagggttgccccaaaccttcaatttgtaaaactcaaaatatctggaaagcttggtgaggcgaggcgggactgtaactcagcactcaccgcagggtgagacccttagggcagcgggtgctacactgaacaaagcggtgaacagccccctcgtgagagggggttcttggcagatgacgccagcagctgacaaacaggcaaggcaggccgggcacggtggctcacgcttgtaatcccagcactttgggagtccaaggtaagcggatcacaaggtcaagagatcgagaccatcctggtctacatggtgaaaccccatctctactaaaaaatacaaaaattagctgggcgtggtgatgcacacttgtagtcccagctactcagggggctgaggcaggagaatcacttgaaccgggaaggccgaggttgcagtgagccgagattgtgctgctgcactccagcctggcgacagagcgagactctatctcaaaaaaaaaaaaaaaaaaaaaaaaaccagcaaggcagggacgccagcagggcacgtgctgaggagacaggcgcgagcaccagaggtgcagggcggcctcttagccggagtccaggaggcctttgaggggagagggcttctggcagaccccaggggtggggatgagcagtgacaggggccctgggggctgggatgtgacagggcagcgtggcagtgtctggtggcccctcccgcaggccatcaccatcgaggctgagccaagagctgatggcagccgccggaccacccgctatgacatcgacatgaccaagtgcatctactgcggcttctgccaggaggcctgtcccgtggatgccatcgtcgaggcacgtgaggcccccgggtgggagggggcctgaggctcctcagcagggcctaaccaccgtccctgcacctcaacctgcagggccccaactttgagttctccacggagacccatgaggagctgctgtacaacaaggagaagttgctcaacaacggggacaagtgggaggccgagatcgccgccaacatccaggctgactacttgtatcggtgacgccccaccggcccgcagcccctgctgcccaataaaaccactccgaccccacggcctcttgtcttgactctggtggtccagggtggggccgttcccggcctgcctgaggcctgtggtgcctccaactggactaggtcgccacctagtctttatgctctctggagtcctgctgccccagccctgccttcctgtagactccagggccccaccaggctctcatggctagaccacaggccgcagcatccctgtcaccctgcctcttcctgggcgtcttccccaaggcccagcgatgccagaggtcaccacagacctgccgttcccactctcccgggtgtcctggctggggcctgggcctcctgtctcccaagagccatccacttgtaagacgcttaggacttggagcctcccaagacctcaggctgaagaacagcaagtggcagaaactcaggccggggcatccttgctgggggtaggaggaagcctgcttggggtgacagtcacacgagggtgacacaggccctgctggccctgagctggcctgcgtccagccacatcctctttcctgtgttccctacgccagggtgctggcccggccactgctcaccacttcctgctttgctggcccagcgacacggtggggtttccctagggccacacacaagccccttgcccatataatggccaaaagcagcccccctgaacttgtgctaagtactgtggaaggatttcacttcatttgcagtgaggaaaccagctccgagaggtgaaagggcttgctcagggccatgcagggcacatcccataataaaactcagttcagagaccttgaccccccccatctaccatcatttccaaaagtgctttttacaaagcactactttgtaaaaagctacttcttcgaaagaacaagtttcctggcccagtgagtgttggaaatgctccagctgctgtgtgcctgctggcaggtactgcatggtagacattcaaggctctgagaaggcctgcagcaaaaacaccagcctctcccagcccattcccagggagcttttctcaggtctaacacctgggcctccttcctagaccaggcattgccatctaatgccaaagtggccaggctcccgcttgggccccacagcctgtggcactggggtgagaagtaactgcaggaggcgaggggaagcctggagcccgggaagtgtccacaggtctggcccgcagctcatcttggccactgatgaaaacaggtgttctttccaaaaacaaggcaggcgcaggactcctgaagcaccgccggtttagcttttcccagacgtaaccgccgtcagagcgtggcatggagcctgtagctgtgcactgaatacttctattccaagcgggtcagtctttccagctcaccgctgggttctttcccttaccgtggtctcccaggcacttactgctgagaccccactcaggctgtctggttgtatcaggccccgaccctgtcagaacaggcctatggcgcccaaccacaagtcccccaattttctgaggaaccacagctgagcttggctgtgactcagtttccaggcccggctctggggctccacttgtccacccctgccgcagccccacaggcctgtgctcgctgtgtggggcttagggatcaccagagctgaagggcccctggcctccagtgggaatgccccaggcctgtccaaagtgcaggcagctggacggtcgtgagtcccagcttccaggcactaggacctgatgacgcccatggtgctgacctggagcaaggtcacagtgacacccccctctaccccccgcggctgcagctgcaggtggagctgacagctggcctctggccccagggtatctcccagggcctgctgggtgcggggcgctgggcagaacaaggcagcatggcctggccctgtgtcctgctgccagtgaagcaggcccagagtggggcagccacccacccaagggccagagcggggcctctccagggtggtcaagagcaggaaggtgtaagcaccggcgggtttcactgccgcccaagggaggggtcccggaggtgggggagcatcctggggaccccaagcccatgagcctgcgaatgttggggtcccatcagccagaggcgcacaagcctcgaagtgagaggagagcagggtctcatctcctatcctgagctgggcctgagcggagctgcccctgcatcggggccagcatagacgcgcgcggttggcagtggtctgttatccgctcctttctccaggcctcctctccgggattaagcgcctcaggacccgtccgccaggccacagcctgggctcaacctctcccagacttcctggactccagtggagccttgggccgggggcggggcgtccctggcccctccccgtcgtcccgcctgcccggaaaggagtgagcggcgcctagtcccgggctggcgggagtgcagttctgagtcccgcccggcgtgcgcggagcggggcagccagcagcggaggcgcggcgcgcagcacacccggggtgagtgcccctgccggggtctgcggagccccagaatttcctgcccaccctcttccccctgccccggggaggagatcctggcgccccacccagttggctccgtgaatgcagctcagcccgccaccccgcagggtgtcaggccttgcggggggccacggaggatccccaagggaggaggagaaggatggggtgtttaccaacacagcccagcgttcccgggcctggtgtgcgcggagctttccccgctgctgcttccttggagggagggacccattctacagatggggaagctgagaccacacaactaggaagtgtcagagctggagaccagctgggtcatttgactccagagcccaccccatttggaatggagggggcgccagaccctctcctactgccttcccatcatctggaggggagggcagaggtgcagagagacctgctgggttcctggaggggccaggaaaggggcacagggtgaggagtgggctggagcctggaccccagggccgcaggatggaggcgtattcatttacaccataaaagtggctgggtgaccctggctagagcggggaccaagggggacaggggtagggggtgagccagtggagcctcacatgccaggcacgggggctgatcacgtccccacacctttccccccgcccattacaggttgttcccccaccccctgggaagtgctggaaggagcccggccctcgagccctcggcatagtggctgtgggagccctgatggccctgagccaggggtgacccctccccagatccccagagctgattccccacacctccttatttggccagcacagccccaaagggagccaggtcagacacaaccctcctctgagctcaccctttgtgctgggcacataacattggactttacctctccaagtgtcagtggagtcctgtatgaaacaaaagcaccgtaccccctccccaagggtttctccccccagggattagtgtgaggtcgtgtggatgaagggattcagttgaggctctggttatttttgtcacctccctagatcctgtctctgtcaggggtgccacgtcccattcacccaaagaggaagtagaggcacagagagggtgagagacttgcccaaggtcacacacccaatctcagcctgggctccaagtccctctgccctgtggccgggcctggtccttagggatggaacccagccccgctgccccctgccctgcccacctgcagccttgggccatctgctcagtgttccctcgttccctccttctctcctttcccaggctggggctggggctgcgtttccctgtttagagttaagtaaaccagacccaggggaggaagtgactggctgggcaggcggggccctgaccaggcctgtcccctccccctaattttcgagctaagcaactgattcccacagaggggccctgggccctgagagcagtggctttggagctggaggggccccagcatccagggcgggttggaggtggcctggcacctgcccccaccccacatcggccttgagcaaggccccgggcccttccccgccattctgtagtttcacttttgttggtttcaacacctggaaggctgcggctgctgccgggcggcccgggcctcaggggacagcccccccacagcagtgctccctggctagccccagggtacccggtggagatgcccgctcctaccactcagcacatgcagctccacagggagcagcgagggctccagccacccccggggcagccctgggcctaagtgcctgggccagtggggtcctgtctagggtgacggcagcccgagaggagggaggccagagtgaaggtgggggtggagccggtgtcactgggagacgctggaggtaggggcgggggtccccatgggcagagcaagccaggagagagcttgaggtcggcctgagggtgggcttcggggtctcccagtcccactgcttactttctgcgtgacctcagcaccgcatcaagcctgcccaggcctcagtttccacctctgtcagatgggggtggtaacagcagcttccaggattcagtgagtgaaggtgcacaggtgcccgtggttgggaactgtctgtggtctgcccctgactggcccccatccgtgtccacccacaggaccatgggctccatgttccggagcgaggaggtggccctggtccagctctttctgcccacagcggctgcctacacctgcgtgagtcggctgggcgagctgggcctcgtggagttcagagacgtgagttgggtgggcaggcgtgggaagggggctactgccaaggttagcccggaggccggtccaggatggggactgccccccctccgccatagggccctggccccatttgaaccccagcggcccctgccatgggcactgctcatgggaagcccgcagctgaggcccctgagctggctcctccccataccctcctggggcatggggtctggtctgtgctctgatctgcgtcttgtggctcccagggcactccacacctttctggaggaggcagctaaggcctggggagagtcaggcctgggctctagggtgaggagctccctgacccccttcccgggacactcacccctccgtgtggcacccacagctcaacgcctcggtgagcgccttccagagacgctttgtggttgatgttcggcgctgtgaggagctggagaagaccttcagtgagttggtcccaggcctacattccaggcaggcttcctggaggaggcatgggccaagtttgatctgaaaggaagagtctgggtttgccaggtggaaggcagagaagggaggtatatgcagggccctgcagggccaagacagagcagctgggatctgtgaagtgtgcttgcgaaggtggctgccttgtgtgggctgagcagagggcctagggcagggctggctggggaggcctcgaatacagcataagagcccaggacttcgtcctgtgggcgccaggaagccacaggggtttctaagcagggaagaggcacagacagctttctcctctacagctgggctggggtgggtggggcccaggatctagggtagggtacccctaaggagcaggcaaaagggacccctgccctgggcaacccctctcaggaggagcctgtgggggcaccaaggcaggggcatggggcaggcagggttttgtgtttgctggtgcagtttacagcttttcaatgatcaggcagacacaggactcacgccagctccggtcccaagccctgcagcgcaagggccggcctgtggggagacctcaggccctcttctgagtggtggccaagggactggggagggagagtgagcccagacctgagctcagggaggggagcacagcttctggatgaaagtttggccgggattttctggccacctccacctggtgaatccagcagctggtggccgatggagtttggggcagcaggtggggccctcaactgttgagacaacctcaactgcaccccactcccgttcctctgcgcccagccttcctgcaggaggaggtgcggcgggctgggctggtcctgcccccgccaaaggggaggctgccggcacccccaccccgggacctgctgcgcatccaggaggagacggagcgcctggcccaggagctgcgggatgtgcggggcaaccagcaggccctgcgggcccagctgcaccagctgcagctccacgccgccgtgctacgccagggccatgaacctcaggtcagctcccacccaggcaggagactggggggctggggaggggctgtccagcctagggctcatggtgcttctgggttcctagctggcagccgcccacacagatggggcctcagagaggacgcccctgctccaggcccccggggggccgcaccaggacctgagggtcaagtgagtgagggatgacctcatgccctttctggccagcccagaacccctggccagtcgctgggctgggccaggctgagctccgactccttgtccagtgctctccccaggctggccccgcctcctccttcaggcccggaacttcccacagtcccaagccctagccctagggggttctcctcttctggtcctgcccgggaggcctcctgccttcccctgtgggcagggccagtgtgcccaattgcccgattgcccgtgctgggcagggtcctgcccggggggcctggtgggggaggcagggcaggaggttggagcagccctgcccagccccgtggccgccagctttgtggcaggtgccgtggagccccacaaggcccctgccctagagcgcctgctctggagggcctgccgcggcttcctcattgccagcttcagggagctggagcagccgctggagcaccccgtgacggtgagcagctggcgctgggctggggggtcctgggcagagcgggaccccagagtcagctgagcctgctctgcagggcgagccagccacgtggatgaccttcctcatctcctactggggtgagcagatcggacagaagatccgcaagatcacggactggtgagtcactgggaacacccgccccaccgccctgctccccaggcccctgctgtcacctcccagcccgccctatcgtgactcctccccatgagctcccttcagactcagagtctcgtagctgtgtccttctggcccctcacgcagcgcatcctccctccagcttccactgccacgtcttcccgtttctgcagcaggaggaggcccgcctcggggccctgcagcagctgcaacagcagagccaggagctgcaggaggtgggtgcccccggccttccggaggcgggtgtaggaggtgggtgcccccggcctcccggaggtgggtgcaggaggtgggtgccctggcctggcctccaggaggtgggtgcaggaggtgggtgccctggcctggcctccaggaggtgggtgcaggaggtgggtgcccccggcccagccaccccacctgcctgcccagcccccgctgactgcccactctggcgcaggtcctcggggagacagagcggttcctgagccaggtgctaggccgggtgctgcagctgctgccgccagggcaggtgcaggtccacaagatgaaggccgtgtacctggccctgaaccagtgcagcgtgagcaccacgcacaagtgcctcattgccgaggcctggtgctctgtgcgagacctgcccgccctgcaggaggccctgcgggacagctcggtgagcagcctgaggcctcgccccctctccgcccgcccctcctaccaggccggggcgtttctgcctcacttccagcctctggctccctgcacctgggctttgcctaggggctccttctcctcccagcctcctccatggcccaccgcttccagggagtctgccctgatggccctggcccagcaagccctaccctgactttcctaagtccctggaggctgcacaggatagttttaaagtcagaagcctcattccaatccaggcccccctgtgaccttaggcctgctcatggtctgtggaaccggtgtgatgcccctgcctccgggggtcacccgccgcgcacagcaggtgcttgcgggtgaggctgggctccttctcctgggccgtccctaggaggcagcatgcttgcctttcccaagcaattgccaatccatgtggtgtctttgggcccccaccagggcagagcagggctgatcatctcacgtcagagagaggggaaggggctgcccagtgagcccccacagggctctacatctccagctgggcctggctggagatcccagggtccctgaaggcccccgccaccgttctggtctgtctctgccctggcacccagatggaggagggagtgagtgccgtggctcaccgcatcccctgccgggacatgccccccacactcatccgcaccaaccgcttcacggccagcttccagggcatcgtggatgcctacggcgtgggccgctaccaggaggtcaaccccggtgagagccacggcatccttacccgtgtcctgggaggctcagctgccccactgggtgggtgtgagcctgagggggaggtatctccatcctgggcctggcctgccctcctgggatgaggggcacacatcccatcactctcaaggggctgttgggctctgcagccagtgtgaggctttatgtcggcccccagccaactcccccttgttgagtttacaagggagccggcacgggcttgtgcaaagaacagaggctgtgcggtgggcatggcccaggttggaagcccatctcgcctactttgagacatttcttagcttctctgagcctcagctgcctcacctgcaaaatggaaataatagcgcaaacctcagaggaatgttgggaagcttagtgactgttggagactgcaagctggagccaggggcagcctttggtgtggttgctttggttgcacagctttttttttttttttgagatagagtcttgctcagttgcccaggctggagtgcaatggcatgatctcggctcactgaaacctccgcctcccaggttcaagcgattctcctgcctcagcctcccaagtagctgggattacaggcacgcaccaccacgcctggctaatttcatatttttagtagagatggggtttcaccatgttggtcaggctggtcttgaacccccgacctcacgtgatccacccacacaggccgttgggggcccaagcaccctgactcttgcccactggatgaggcagggcccctccctgtcctgtgaccaagtcccctcccgacatgggctccaccacatcacacccatgctatgggccgggcccccactcagtgtcactgggggcactggggggtttgctgcttctgcagggccagtgtcctggggctggatctgggccccaacaggattcccctgcacgtgggcagaggctggtgcagctagagcatcacctggaggcccgtggcagatagaatgctgccagctcaaagcaccagccgtcggggcagcgtgtttgccagggaagctgtaacaaagtgccaccggctactggcttaaggggcagacacggtcccacagtcctggaggctggaagtccaagaccaaggtgtcagcaggggccgggggcactggctgatgcctgtgatctcagcactttgggaggctgtggtgggaggaggatctctggagtccaggagttcgagaccagcctgggcaacatagcaagcccttgtatcttaaaaaaataaaagatgatgaggtgttgtcagcaggagtggctccttctgaggctgtccaggaagatctgttcccggcctctctcctgggcttggagcggccgtcctcatcttcacacactgttctccttctatgtgggtccaaatgttccttttcataaggacatcgggcacactggattggggcccactgtaatggccttatcttaacccagtgacctctgtaaggaccctgtctccaaagaaggtcacatctggagttcctgggggttgcgactccagtgtatcttttttggggtcacaacacagcccctgacagtgtgtatgttggggtcctcctgcctcccatgaggacttgttcccattttactgatgggaagtcgagacttcagagctgaagtgaccagctcggcctcccggaacttgccatgtgccagctggggctgcctgtggctccctgtcctctctggcttctgtgtggagctctgggaacagcaacagctgaagctgctaacttcctgtggctccagcagctggcccgtgctgcccgtggagaacttatgaagtggtctggtgttacctgcattttacagatggggaaatggaggctcagagaggtgaagtggctgggccaaggtcacacagctcctaagtggtgggttctttttttttttttttttttcggagacagaatcttcgctctgtcgcgcaggctggagtgcagtggcgcgagctcggctcactgcaacctccgcctcccgggttcaaatgattctcctgcctcagcctcctgagtagctgggattacaggcacctgccaccatgcccagctaatttttctgtttttagtacaggcagggtttcaccgtgtgggccaggctggtctcgaactcctgacctcgggtgatgcccccccccccccccgtctcggcctcccagagtgctgggattacaggcatgagccactgtgcctggctgctaagtgatgggttcttgactgcaggccagcagggcctccgtggcgtcttgggccgggaggcagatgctggtgtgttcgggggttcccagctcacccacctctgcccacagctccctacaccatcatcaccttccccttcctgtttgctgtgatgttcggggatgtgggccacgggctgctcatgttcctgttcgccctggccatggtccttgcggagaaccgaccggctgtgaaggccgcgcagaacgaggtgaggggcggggctggggtcctgatgagggtagcagggccaggcagcccctcaccacaccactgcccccccagatctggcagactttcttcaggggccgctacctgctcctgcttatgggcctgttctccatctacaccggcttcatctacaacgagtgcttcagtcgcgccaccagcatcttcccctcgggctggagtgtggccgccatggccaaccagtctggctggaggtgaggcccgggccccagcccggctgggggccccgcagcacccgcagccctgaccgccctcccctgcgttgccgcagtgatgcattcctggcccagcacacgatgcttaccctggatcccaacgtcaccggtgtcttcctgggaccctacccctttggcatcgatcctgtgagtcctgggatggagtgtccgtgggtggtgaaggcagctgggagtgggggctggggctcccctcggttcagccgtcctgcagcgctgtcgctgagcactcctgtgtgccaggccctttcctcagcacaagaggcagacaagcctcctgccctgcggagcctgcatcacagtcccctgagtgtgcggaggcaaagcgagaccagccaggaaccagtctcctgagtgtgcagaggcaaagcgagactggacaggaaccagcctgcagcttgcactgtgccaagcactgttcccaaccctctgtggaagtgattttcttttttcttttttttatttttggatatagagtctcattctgttgcccaggctggagtgcagtggtgtgatcttggctcactgcaacctccatctcccgggttcaagcgattcccctgcttcagcctcctgagtagctgggattacaggcgcccgccaccatgcctggctaatttctgtatttttagtagagacagggtttcaccatgttggctaggctggtctcgaactcctgacctcatgtgatccacctgcttcagcctctcgaagtgctgggattacaggcgtgagtcaccgcgcccagcctgattttctatttgaacctcgtaacaaccccgtgggcctcacattagtagtgtcctcacctaaagaagagactgaggcacagaggtcatgcccaaggtcacccaggctggcaccgtggcagctggcccatctgcgctctgttgcccctcggtgggtgggtgatggatgaggctgcaggctccgagggggaaaacagggtggtgagagagtgactcgggccggggacttcctggcagtgatggcgagggagcccctgagtccagcccacccctgctgccaccctagatttggagcctggctgccaaccacttgagcttcctcaactccttcaagatgaagatgtccgtcatcctgggcgtcgtgcacatggcctttggggtggtcctcggagtcttcaaccacgtgtgagggccaaggctgcccgggggacgggaggctggcaggccagagtgggccccagtgagcacacctccctcttgcccgccaggcactttggccagaggcaccggctgctgctggagacgctgccggagctcaccttcctgctgggactcttcggttacctcgtgttcctagtcatctacaagtggctgtgtgtctgggctgccagggccgcctcggcccccagcatcctcatccacttcatcaacatgttcctcttctcccacagccccagcaacaggctgctctacccccggcaggtgggctgcggctggtgggggccgggctcacacggcctcatggggaccccgcggtcacagggccactgggagctgcaagatcctcgtccgagaaacggggatgcaggccccgggccgtgcagacagggccgtcagaggtgatggtgtgcatctttagcaggtggcacaactggcactgggaaccgggggtcccttccctcaggagtccttatggaggcagaccctcacccagtgagggcacggagcccccgggggccctggagggaggagcgaccgcaggctctctgggccccgtgactgctgtgactcaggttcctttgcaggtgtgcacagcagggacgccctgactctcgccctctccctggcaggaggtggtccaggccacgctggtggtcctggccttggccatggtgcccatcctgctgcttggcacacccctgcacctgctgcaccgccaccgccgccgcctgcggaggaggcccgctgaccgacaggtgggaccggggcctaaggtgtggggggctgcttgcggggagaggccactgtccggtgtgtccctgactcctcgcttcctgacagactcctgagtggccaggagcaggcctggcgggtggtgggggacctcctggggctggagtgctgccaacactgcctgctcatgccccaggaggaaaacaaggccgggttgctggacctgcctgacgcatctgtgaatggctggagctccgatgaggaaaaggcagggggcctggatgatgaagaggaggccgaggtgggtgcagtgccttcctgggggtgggacggctgaggccctgccggccctcactgcacccgccccgcagctcgtcccctccgaggtgctcatgcaccaggccatccacaccatcgagttctgcctgggctgcgtctccaacaccgcctcctacctgcgcctgtgggccctgagcctggcccacgcccgtgagtgacctggccaccgacggctggccccagctcctggcttctcacataccgctgctggctgggcgggttgcttctctctgggcctcagtttcccctctgtaaagtgggactgtccaaggaggtccctcgctggccccccgtgcagggagggcttcaggctgcggcaggtaggtagggggctggcaggcacccacttgccgttggcccccactgtctcctttgcttgcagagctgtccgaggttctgtgggccatggtgatgcgcataggcctgggcctgggccgggaggtgggcgtggcggctgtggtgctggtccccatctttgccgcctttgccgtgatgaccgtggctatcctgctggtgatggagggactctcagccttcctgcacgccctgcggctgcactggtgagcgaccacccactggcctgggctgctcaaggcgtgagttcccctcaccaacccctctgcttctcacccccagggtggaattccagaacaagttctactcaggcacgggctacaagctgagtcccttcaccttcgctgccacagatgactagggcccactgcaggtcctgccagacctccttcctgacctctgaggcaggagaggaataaagacggtccgccctggcagtgatgtctcgtctctcttccctcctttttagctgaggcaggtggcagggtagaaggcatggtgtaggatctgggacctcaaaagtcaaggcctggacctgagcagatctgcaataatgtcagactcttggggtgaaaaggggcagaaaagggccaaggagagatgtttccagcacattctaacttggagtgagcaaatgtcttcccaggccgggtcaggggagtgagctccccatccttggaggtgtgcacctggctgtgagcgggtgtctgggttactctctgttgggagtggtgccaatatccatgccctggtgccgggcctcaggggtctggaagtacagagcagtgtggggcacctgagccccggccagtgctccatgcagggccatggtgtcacacgcccaaggccacacacctgccaggaagggtagaggctgtccccagcagcagacattacccaggaccccggggttcagaacaggggctgagcctgactccaggcccagcctcccctcacctgagactacagtcttcctgatccctcccaggtggtccttcctgcgttgctggcagaatgggggtggctttctgcagttccctctggcctgggtcccacccccactgggaggcagaggaagtgcttcccagaagccaacaagctgcaaagtggttcttcccacagctgtggctgaggccagctgctgggaggagcctgtccattggctcctggactgctttgctcaggacctctggatgccaggggtcgtatcaggggctctaaggtaattccacatgcccagcagattcagcttagagaaacggtgctcacagtgctggggtaggagcagagaaggctaaatgaaggactccggagagctgcaggtggatctggaccaaatccagaacccaacgccttactccctcctggggagagagctgggcagagacttggggcgggcagtgaggtggggataggtgagcagcactcgtggtgagtggccccagtgtgatttaggaggggtgcagtgtgggatcccagggacatgaccagtcagccccgccctggctttgacatgggggtgcctggcagtggtggctagagaagtccagtttgccaagagaatggcacataaggcactggggtgggcacctctggggcatggacatagggagacatagggatggggtgggtcacctgcgtggaggactgggcactgaacagcacaggcccgagcccatccttgtccacgtgagcttatggcctgatgtagagaccaccaggggctccaggaaagttaagctgcatggagagaaacgatgggccagggccgggcccagggtggtttagggaatggcagtgtcctgggtagaataggaaggcctgagactgtgactgagctgacagtggggcaaagtgaaggagcccagtattggaagatcggctccacatgtatctctgcgaggagactgcaagcgagctcgtgtggaccaggcagaggcgagggctgagtgaggccagcagtggcctgggcacaggaagacggtgagtgagaagccactggagctcctgtgcaggagcgcaacacctttactgcttcattcagtttggcttcacctgcttaaaactgtaactctctagaaggctgaacagcaaaagcctccctcctgcccagccgctcagcatccccaggcaccagcactgctcccagtctccaacgtcctccagggctcttcgcttctgggctagaagcagggaaaccagagtgtgctggggaagaagaggaggaggtggaggagggctgatgatggggccacatgctgctgggatgccagctgagagcagcggagcactgctaagctaaggggctgagtgggtgcagatggagccctccgtgggctccttcaggtaccaggagccctgcctgagattcaggacacatccaagggtgacagcttgaggttgggtttttatttttttatttgtatagtacaatctctgtggtagcagaaatatatgcacaaaaaacaattcaaataagagttcagagtaaaaaaaagtcagctaagactgtatcccgcaggacatttcatatatatggatttcacagctacactcgatccacgccccacaccacatacaggctgctgtctcccacaagaatgatgatgtcaggggcatcaggaaaggtaagggccgggaaaccgggcccttggagaaccctgcccaggggaggcccagcctactcacaggatccgacactccaggcagagcagagggcaggagaggcccaaagagctaggtcaagcagctggctcccctgggaggggagccgggagacagggaggtcctcacactgcccccgtggccacgcatggctgtctgcacactccatcaggaggaagggcaggggagaagtcacatgcagtacagtgaaactcatcagtgtcacacacgcccagcaggaggggagagctctgctccacacgctggcggccttggctgctccagagcaatccgctgctccagcttcagccatgggaccaagagggtaaaggagcagcttctggaggccccaggcagaggccaccttgcagcagtgactggcgactttgcagtacatctctgctcacttgctgtcccttgggagtgagcaccgtctataacacatcgccatctacaaaagcctggtcacagtgttcaccagcacattcatgaaaatttaaatcaacattaaccaaagtacctgcaagtaacactgcttactcttgctgtttgcctcatctgactggaaaccttagcccccaaatatgaaatgccttctctagattaaaaggattcagagatgttgcactattgcactatatttctgcttcccgatctcgtttctgagtcctagtgaaatcgtaaacaagagatgaaataaacgtcgctccattttaataccgtctttagtatcatacacatgtgttcagtagtgagccacccaaagcctcctgccacaggagcagtagtcgaagcacagaggggaccccgctctgctgcctccccatgcagtccagtgatgaggtggatggagtcctccccacagtcacaccccaagcttcctcttctggtggaaataggcatcaaaccttgcttgggcgtagtcctaggagacagcaaagagaaggcctcagcaaggaatcctgctggcctgaaccctgcccatgtgtcccccaatccccaccccaggcaagagctgagggcacggacccatgagaccaaaagcacaggactggcctgtgcagcagggctgctcgggggcctcgctgctctacaggtgcaggctcctcaagctcccagcccaccccacacaccttcattctcaggaggcctggtttataggcatgggccagcccagccctgcctctcaggatgaacgtctcatccacatgcttagcactgctaccattcatcaccttgctaaccctgggtgctgtgggcactgactgaccgacataacacaccttttagagcaaaagacccctgggacacaggcgagtctagaacagaaggggagaagaggatgcccatcgcctatttcccgggatctcctgcagcatgacttttaagaaggacactgagaggcaagggagaaaacccggcttggtgttctgtttctgccactatttttctgggattgtgttgtgtgaggacaacacaatctcaaagacccactcctaatctaaaagtctgcaattctagaagccaggaagattacaattaacttttttgaaaaattaactgagctgtaatttctactctacaagcatgagcccattttaagtgtccagttgagggccttcacagatgcatccagccagttctccaccaccgcagtcaggagacctgtgtttccagcatccctacaagctcccatgggcctcttgcagttggccacaggcagccaccgactcaatatctgtcactatggactggacttttctttcctagagtagcacataaatgccactatacaatatgcagcctcgtgtctggcttctcactcagcgtgctgtctctgagtggcctgtgctgtcatgcactggtgccaccttccttttgcactgccgagtgttctcagtacacggatctggcactgtcgtatccacacacctgctgactggcatttaggctgcttccagtttgggacgattataaatgaaggtgcagaccgggcgaggtggctcacacctgtaatcccaacactttggaaggccaaggcagacggatcacttgaggtcaggagtttgagaccagactggtcaacacggcgaaaccccctctactaaaaataaaaaattagctgggtgcggtggcgggcgcctgtaatcccagctactcaagaggctgaggcaggagaattgcttgaacccgggaggcggaggttgcagtgagccaagatcgggccactgtactcctcctgcctgggcaacagagtgagactctgtctcaaaaacagacaaacaaatgaagctgctatgagtgtttgagtgcaagtcttggtgtggaatttgttttcatttgttctggaaaaattccccaggagggctgctgggtggtctaacccatcttcacactggctgtcgcgactgcattcccagcagcagcgcatgcgcattcccattgctccatgtgctcgccatttgggaccgtcagttctttcaagttttagccatcactgtgggtgtgtagggtatcgcaatgaggctttgattcacatttctttaatgactaattatacaaaacacatgaaaagattcttactggccatgtgtttctcttaagtgtccaaatcttccatccatttataaagcaggctgaggccgggcgcggtggctcatgcctgtaatcctagcactttgggaggccaaggcgggtggatcacctgaggtcaggagttcgagaccagcctgaccaacacaaagaaaccccgtctctacttaaaaaaaaaaaaaaattagccaggcatggtggtgggctcctgtaatcccagctacttgggaggctgaggcaggagagtcgtttgaacccagaaggcagaggttgtggtgagccgagatcgcaccattgaactccagcctgcgcaacaagagcgaaactccatctcaaaataataataatgaagcaggctgtttggtttctggctgagttatgagttctttatatatcctaaatatgagtcctttattaaatatacatttgtagtatttcctcccagtctgtggcttgccttttcattttctccatgatatcgttcagagttactcattttgataaagtccaactgtgatgacatatatgtgtgtttttgtccagggtccctggctcataactcccatagcccttactacagtaaacagaatctctctctctgaccttctgccgtcctttcacctgcccaaagctagactctaatctgactgtgggtcataagactcttattccagagggggtcctgcaccataccctgggataaggaatgctgtacagagaagcccgaagaacctggtcaggtcttgctaggtttagatcacaccttttttgtccaatcacatttcaacacggttgtccacatttcaatcatgcctatccaatgacatctccataaaatgcccaagaggacagggtttggggagtttctagagaactgaatgtggaggctgacaggaaggtgaacaagaatgagttccccaacccacccacagggacagaagctcctgtgctgggaatcctttcagacctcaccccacctatttatctcttcacccttaaaataccctttgttagctaggcatggtggcggaatgtctgtagtcccagctacttggaaggttgagacaagaggatcgcttgagcccagaagttggagaccagcctgggcaacacagtgagaccctgtcttaaaaaaaaaaaagtaatacactggtaaacttacgtgtttccctgagttctgtgagctgctctagcaaattaattgaacccgaggggaacgtgggaactccaatatatggctagttggtcagaaattccagaggcctggacttgcaactggtgttggaagtggggggcagtcttaaggtctcaaccctcaacctgtggggtctgactctgtccccacgtagacagtgtcgtaatggaattggagggcacccatctggtgtccactccagaactgattacttgtttgttggcggggagaaccacccctgacgtggtcactttagtcttctgtggtgatgattgttgctgatgaaaggaatgggaaaaagcactttggtttttatgtgtttcctgctcacagcaacttactctattttttcctcttttatggctagtgctttatgtaacccaagaaatctgtgcttaggtcagtaagcttttctttttttcttttttgagacggagtctcattctgtcgcccaggccagagtgcagtggcatgatctcggctcaatgcaagctccacctcccgagttcacaccattctcctgcctcagcctctccagtagctgggactacaggcacctgccaccaggcccggctaattttttgtatttttagtagagacaaggtttcaccgtgttagccaggatggtctcaatctcctgacctcgtgatccaccagcctcggcctcccaaagtgctgggattacaggcgtgagccaccgcgaccagtctaggtcactaagcttttctcttgtgttttctcatagaaacttaatagttttagccttcacatttaggtctattatctgtttcaagttgactgttgtttatggcacagaatcaggttcagttttttctccacatgactcttcaaatgttcttgcatcattttttgaaaatacaatcctttccctcttaaattaccttggcctttctgttgagtaccaggtgattatatacacatggatcaatttctggacactgtattctgttccatctgatttgttttttgttttgttttgtttttgagatggggtcttgctctgttgcccaggctggagtgcagtggtgtgatcacagctcccctgacttcccaggctaaagtgatcttcccagctcagcctcccgcgcagctgggactacaggcatgtgctacagacacccagctaattgtttcgtattttttgtagagatgagtcttgctatgctgcccaggctggtttccaactcctgggctctagcgattctcctgcctcagcctcccaaagtgctggatgactggcttgagccaccacacctggatgatttacattacttatgccaccaccacactgccttgacttctgtgcttcagagaagtcttataaccaggtagtagaagtcttctttgttcttttacaaaattattttggttattccagactctttgcattttcatataaatttcaggatcagcatgtcaatttctacacagaagcctgtgggggttttgattaggcctgtggggaatgtacaggtcagtgtggggagaatgagcatctttaccttaaggcttccatccatcaaggtggtatcttctccatttatttcacttctttattttttacactctttcatagtttccaatgtacatatcttacactattaaacatttttccatgtacagttgtttctaccatgtagaaatccaactgatttttgtatactgaccttgtatcttgtgactttgataaactcattcattaggttaagcaacttttctgttgattcctttattattttaaaagcacacaatcatgtcacctaaagaataaaggcagtgtttcttcttccttcccagtgcacctatatttcctttctttgtcttgcctcactgcaccagctaggagcttcagtacaacacagaagacatgcagtgagaacaggcgtccttgcatgttctgtacttggggtgggggtcaaaggggacattttccctgttaccactagtgataatgttggctgtgggttttcctttttttttattgagacagagttttgctcttgttgcccaggctggagtgcagtggcgtgatctcggctcactgcaacctccacctcctgggttcaagcgattctcctgcctcagtttcctgagtagctgggattacaggcatgtgccaccacccctggctaattctgtattttagtagagacggggtttctccgtgttagtcaggctggtctcgaactcccgacctcaggtgatccacctgccctggcctcccaaagtgttgggattacaggcatgagccaccgcgcctggctggctgagggtttttcatacatgcctttatctggctgaggaagatcccctctagtcctagtttgctgagatttttttttatcacattggatcttgtcaaatgctttttcctgtggtccctgagataatcatacggtttttcaccttcattctgttaatatgaagaattatatgaactgattttttcaaatataaaccagccttgcattccagggataaatgccacttgaccataatatattatccttttacatatgttagtggatttaatttttgccaatgttttgatagggattttgtgtaatgtttcttcttatggaatataaacatttaagctacaaagccgtaagtttctagatactgctttatgtatatcccacaaatactgacatgctatgttttcattataattcagtttaaaatattttctcattttctttttaatttctttgacccagggtttatttagaagtgtactgtttaatttccaaataattgagaattttctagctatcttttgttgttgatttccacttaaatttcactgagaacatatccagtattatttcaatccctttgaatttatcaagacctgtctgatgggccagcatatggtctatcttgaggaatattccatattcatttgaaaagaatgtgcaccctgcagttgctggggggtttaatgaacatgcatgaggccaggctggcagggagagttgtaaggccctatccctccttctgcgtgtgttcctcctttgttctaaccacagaagaggagtggtgagatctcccatgttttttgttttgttttgtttttgtttctgagatagagtttcactcttttttttttgagacccagagtctcgctctgtcgcccaggctggagtgcagtggcgtgatctcggctcactgcaagctccgcctcctgggttcatgccattctcctgcctcagcctcccgagttagctgggactacaggcacccaccaacaggcccagctaatttttttttttgtatttttagtagagacggggtttcaccgtgtttgccaggatggtctcgatctcctgacctcgtgatccgcccgcctcggcctcccaaagttctgggattacaggcatgggccaccgcacccggccagagtttcattcttattgtccaggctggagtgcaatggcgccatctcggctcactgcaaactctgcctcccaggttcaagcgattctcctgcctcagcctccctaagtacctgggattacaggcatgtgccaccatgcccagctaatttttgtatttttagtagagatagagtttcaccatattggttaggctggtctcaaactcctgacctcaagtgatccaaccacctcggcctcccaaagtgctgggattacaggcgtgagccactgcaaccggccgagatcaccaactttaatcgtgaatctgccattttcttctttcacttttgtcagttttaatatcatgtcttttgaagcaagacaagggtttttaatgtcctctggatgtactgatgcctttattatcacaaaatgcccttctttatctctagtaatattccttgttacgaagtgtgctttgtcgtacagtatcatttgaccatgactcaaatctgctttaaaaatccaatgtccccttcttttacctaatatcatccttgcattaccaaaccttctgcctagaagtagaaatcattgtagtataagactgaggaggtcaaaatgaactagtcccatccctgtcccaaaggaaggcagctcaccagactgtggacatttgtgttatcccccaccccaagacaactcaccaacattcattcactatggaacaacagaaaggtttgtctgaaggttaaaaatactttctatttctatgtcagtgacagtttttttttttttttttttttttttttttgagacagaatcttgttctgtcacccaggctggagtgcagtggcatgatttcagctcactgcaacctccacctcctgggttcaagcggttctcctgcctcagcctcttgagtagctgggattacaggcgcccgccaccatgcatgctaattttggtatttttagtagagatggggtttccccacgttggccaggatggtctcgaactcctgacctcaggtgatctgcccacctcagcctcccgaagtgctgggattacaggcgtgagccaccgtacccggctgacaattcttaaggttaaaattaaatgacagcctagcttggttacaaacatgcctatgaaaaacaggaggtctaattcaataattaccagcttccaacccaaagtcgggcactacaggctggagaatgaagtggtaaccgataaataaaaccttccacagcacaggcaggagccacccactcttcttcacttactgtcccgtgtcagaagggactgaggtcagagctggacttcgagggtgcagatgcctacattccccatcaggattgcaggcacttctctgaagcaggggaggcaaggtcagctggcctggaagtgagggcaacctccaaaggcaaccacagcatcagtgacagcggcttctcccccggcttcctgggctgagccacactgtcctgatgccaccaggtcaccacattcgggtacttggggagacagagaaccctctgtaaggaacagtcatttgctgccaacattcacaaatactatagcatttttacctgggagtaggaagaaaaaaaaaaacaaaaacgctgctaaaacataccatgtacccaaattcaatagatgaaatcttggcttgtacaatggaccacagtccccagaggaaatgagatgcaagggcaaacctggaatgataaaagcaagaaacatataagagacatacagtatcagttacaggactgatgaaatgatttcatgccagatggacattttaacttgtgtggatgcaaacctagttagtgttggcaaatcatgggtctatattccacgggactaactaagaacaatgggaataccactcccacacccttccctcatctgctagtgacaggtgcactggtgagtgtgaacacacacagctggcctggccatggcacacgtaaatgccacttggccataatatattcacaaggtgaatatattcacattcacagggtgcaggtgaaggcctgggtggccatgctggcagaaaagaaagcaagcttgctacaagggagggtgcacaccatagcaaccaagaggcagccctttgctggaggcgggatgaagctctcactccttgagcaagagaattctcaaatcccatccttgtcccatcccctcctgtcacacagaagtgaaaagagcagatcagagagcgtgagccacgtcaccatctctaagctgtaccaagcccccaagtcactgtgaatccaagttcctcctcaaacaataccctgagggctcatccacatgaagataaagctcaaatttaggagtgcctgctctagtatcctccaaccctactctctgttcatcctgtggtccccggcccacaagagtcccgtgtgctaccctttctgtctgggttctcctccatctgtttttttctatttccaccagttcaagaaacagaaagagatgatgtatgctgcggtgaagcccagcaggtaggcaggtgtgacatcacacttagtgttgggggtgagcactctggaggccacgaggagatgactgtgctaagtgcgtggaaagatgaggggccacagtgacttaaacagccattctaccaaaaaatgtcacaggagaccccaaataataggaacaacccacaggcctcttgactaaagagatggacaaatagtggtctagacctttgcacaatctggaagtttcagggccctgctttgaaaactgttgagaaaacagttaaaagcaagacttaaaaccgataaacataagtttaatcattttctaggagaaacttaagagttaaaacacagcatatggtggccgccactccagaagcatcagtgacaagtttgcagggacagatgcagtagcccacatctgtaatcctagcactttggggggccaaggcaggagaaccacttgagcccaggagttcatgaccagcctgggcaacagagcaagacctcgtgtctacaaaaaaatacaaaaattagccaggcatggtggtacgtgcctgtagtcccagttacttgggaggctgaggcaagaggcttgctaagagttagaggctgcagtgagccatgatcgcatagctgcactccagcttgggtgacagatcaagactccatctcaaaaaaaaaaaaaattctataggctctgggtggcagcagccctgtatggctgggttgttgtgtctggatgacagttcagaatgccacaaagtgtcctgacccttcttggacatgggaactcttcttgtgatatggtttggctctgtctccccacccaaatctcatctttaattgtaatccccatgtgtggagggagggacctggcaggaggtgattagatcatgggggtagtttcccccatgctgtcctcacaatagtgagggagttctcacaagatctgatggttttacaagtatttggtagtcctaccttcttctctatctctctgcccctctctctcctggcgccatgtaagatgtgccttgcttcccctttgccttctgctatgattgttaagtttcctgaggcctccctggccatgcagaactgtgagtcaattaaaactcctttctttataaattacccagtctcaggtaatatctttgtagccatgtgagaacagactaatatactttgcctgctgtatgctcagatctgaaagctctgcatagtctcggccacaatggagaagtagcagattctatttttgacaaagtgcaagtcctaaagatgtacgattaaaaagaagctcctaggccaggcgcagtggctcacatctgtaatcccagcatgggaaggccgagctgggtggatcactggaggtcaggagttcaagactagcctggccaacatggcaaaaacccatctctactaaaaaatacaaaaattagctggacatggtggcaggcacctgtaatcccagctacttgggaagctgagacaggagaattgcttgaacccgggaggcggaggttgcagtgagccgagattgcgccactgcactccagcctgggtgacagagcaagactctgtctcaaaaaaaaaaaaagaagaagaagctctaaaatactcctaattgcaagtcagcatctcccaaatatagtctataaagaggaaagctatctttacaaatcaaaaaaggaaaaatgttacctattaacttcaagcaacatttcttcttttataatggatttttcttcagtactgaggttttcaaagtcattttggaatgcaggcaagtaactggaaataaaatggagcttaaaaaaaagtaattgtgttaggatcaatgatggttaaaatagacaatgtcaatagctgtcactaagcatatgcatctactgtgacacactgggagacacacactcaacatgatgttcagcatctccgacatcctggggctggcaccagtgagccaacctttgctaggttttcagccgctctctctccccaggatttctagtggagatacagtgtctaggctcttcagcatactttttccatttagagtagcacttaaaacataaactggagaccactattttggaggcaggcttggtgcaccctcccaatcctactcagcttcagcaccgctaccaaggtttcagtgctgggctgaggaatgggagagaaagatctcaggaggaaattcccatgagaactgattctccacacaatcaccagcctcctcccatcattcaggacaggaaagggaactgttaacaccaaagatatttcctcccactactaaaccctggtgcccgaaagattacttctctctccatagtgtgaaatgaatagaaaaaggtcagtgatcaccaaaaagatggccagaaagcagaatcaaggctgggcttttcaaaaaaatactacaaggaactacaaaggatgacaaagctcttctctgaatacaagtatctctggcacagagatttttaataagctggactaaaaggtcaagtttgtgtctacatttaacaggaacaaaataacattttttaacataaaccaaattttaaaaggttatctttaaaaatgaagatgtaggccaggcatggtggctcacaactgtaatcccagcagtttgggaggctgaggcaggaggatcacttgagcccaggagtttgagaccagcctgggcaacttggtgaaatcccatctctacaaaaaatacaaacaattagctgggcgtggtggcatgcgtctgtggtcccagctacttggggggctgaggcgagaggatcacctgagcacagaaggtcaagggtacagtgagccatgatcgcactactgcactccagcctgggaaacagagtgagaccctgcctcaaaaaataaaaaagaagatgtaattctaactgcatgaaattgacatgtaattttcctatcaagtatacaaaaactcatctcctacctgttgtttcttggtgggatacttccggatgtttgctctgaaaaaagggtatttttcatagctataatcatacatccactcacagaagtgatttccaatgtcgaatcccctgaaataagacataagacagtgcacacaatgaggcaaaccgtatgcctggaggctccctgactgcagaagaaagaaaggctgagttccgagcacgccactcctgttgccatctggacttgctgagggagcaggactgtagctgctttaatgacagagagagacaacaggtggttgatcagcatcacagctgactaaagctatacaggtgcacctgaaccactactccagaacattgtgtctcctagaccaggatttatgagaagaaaatgacctctgaagccaaaagaaaatgccaaagtctggactgaatggcatggctgtccccaactagcgctgtctgctaggaacaaagaaggctgtgctgcttcaccacaaccatcaccggccactggacgagaagccactgattccaggtgaagcagcttgcaactcagagcggcattttgacttattttctctaataactgttaattaagcatatcgtaatgataaatcaatattgagatggaaacactggactgtaacacagtacctgtaattgtaactgctgtattcgaaatcaatgagcatcagtttctgtttttcagaattctctcggccttccagcaacaagatattacctgcaaaaggtttggataacatggtttatgttttacaatagaaggctcaagtccttgaacagcagagccgagagaatggatttgatcccttagggaatcctaactgaatgtggcttttggtctgtggacatcaccagggcctagacagagcgtagaagtgctcacgggaggcataaccctatgcagggtggctcctgacccacctggccatgagaacccctgctcacagccctagtcctcgccagacccccaggatcactgtggaacaaagcctggcctcttgctctgctgtcaggacagtacttcccaaatgttctgcatggtggcatgcaggagctcgtgctagccaaacaccaccctcagcagccctgggacttggtttgctgtctgcaggccagctggctgcagcactccagctgggaagctgtgggagtgccctcctggtaagaaaggcaagggagagctcagctgccacaggggatcccctgctttgttcttgcctgcttttccttcccaaggagaccacaggcagcattcctacaagactatttgctttagtattggattctgggtcaggagttggtcagccatcagcctggctctgcaggcctgcgttcctgagatccccacactcgacatgatgttcagcatctccgacatcctgctgctggcaccagtgagccaaccttcgctaggttttcagcagctctctctccttaggatttctagtggaggtatagtgtctaggctcttcagcatactttttccatttagagtagcaattacaatgtaaactggagaccagaaaacgtgtattggctcacacttgtaatcacagcactttgggaggtggaggtgggaggatcacttaagtccaggagtttaagaccagcctgggcaacacagagaaactccatctccacaaataattagccaggtgtagtggtgtgcgcctgtgatcccaactactcaggaggctaaggcaggaggatcacttaagcccaacaggctaaggttacgtggagcctagactgcactactgcacaccagcctgggtgacacagtaacagtctcaaaaaaaaggcaaattggaggcagacgcccaaagtagcacaacaaaattaatgtacaactgttacctcttcgatccttcctacactttgccatcatcaacacagccgatctcctccagtcccctctctctagtgatgtctgtgccatttatcaccccctcaccaccagaagggcaagggtaatacacaaagctgtagctgtaatgtctacaccctccttgagttagccagcgatgagcagctaattagtaaaaggtaatttggctcaaatgaatggcttatggatgacgagtcttcatgagaaactgttctcaggattaaaagcaaactgctgagcctggcaaacaagggctcaaggtgggacctgaactactgtgactaggggaggcaaggtcaaggcagagagaggccatgtcagcagcaccagtgggagctgcatagtggggggcctctgatgagactgttcaatgtgcaattgcatgggatgaagttttgttacagtaaggaacatatcactgtcatgttttcaaagcagagaagcccgaaataattaatagcacagtgcactgatactaggagaggaggtgttaggattacacgtgttgcgataagcaacactacgctgtgtggtgcagaagggggaagggcccgggactcaatggggtaggcagtggatcttgttcttttattgctttttcaggttaaaaaaaaatcatacatgtttactgtaaggagttaaacactgaaaaagtaatatgtgacttagaaagtttaagttcttcatcccagttcccaagtttagtgaatattctttcggatttcttccatgtaattttttttttttttttaacaggatcttgctctgtcatccaggctacagtacagtggtgcgatcacagcatactatagccttgaactcctaggctcaagccatcctcctgcctcagcttaccaagtagctgggactacaggtgcacactactatacctggctaatgtttttattttttgtagagatggggtcttgctatgttgcccaggctggtctagaactcctgggctcaagcaatcctcccaccttggcctcccaaagtgctgggattacagacatgagacattgtgactggcctcatactctataaaaataatacaaaacctcattgtctggttgtatcatactttaatgtacctaatactcttgatgctaccttacatttttcagacacactgccagtaattttctaagtatgcacacaaacctcatctgtaacagaacatagcaattcttaccttcttgacagtcattatgacaaaatacaactggagatggagtagattcaagcaatgatctgaaaagaaaggtttcactgttacccatcacgcttctcagtcagctgcacacagtcttgctttctccacatggccagcaccaaattcgtgctccaaagcaacacacagtttcagagtagtatctgtgatgtgaattctgacaactgcgtcattacgtggcaacaactccacaggccctctgcactcagctcttcccccggaggacctctgcatgtgccgctccctcctggagcccctttctctgctggtctcggcttgtatagcacccccttagacagcccttctcttaccagtgacccaagcaggtcctcctatgcagactaagggcctactttgatctgtttctgtcacagcacttatcacaatttgacattattttatttgtttacttgttttccctcagcagcgatcatcaagcctagcagaggaggcacaaacctgagtaattaaaggtgtaaatacttgtggctgggtgtggtggctcgcgcctgtaatcctagcactttgggaggccgaggtgggccgatcacgaggtcaagagatcaagaccactctggccaacatggtgtaaccccatctccacaaaaatacaaaaattagctgggtgtgggggcgcatgcctgtagttccagctactcgggaggctgaggcaggagaatcacttgaacccaggagggtgaagctgcagtgagtcaagatcgcgccactgcactccagcctggcaacaaagcgagactccgtcttataaaaaaaaaaaaaaaaggtgtaaatacttgttagtgtacagatgtgagtggcctgcgccaagcatcactctgaggacaatgacggccttgcttcagagatcagtatgaagactctgtttctcgcaaaagccaaggttgaactgtaaggaagaaggatcttcctcacactccccagcctgcccttactcccttctccccaccagagaaaatccaccccaccagacactctactgccctggccaccaagccactcctttgacattttccttctcaatggaaccttcacaaactgaccagaggccacgtgtgggcttctagtccatagagtccataatctctagtcctctagagaaccataattccagatgacaaaacttatggtttaaattcatcctgtaaaaccaatgtaaaatgccagacataaggcaagctcaatcaatgtttactgacaacagttttagtgactaagaatatttaaagtcaggaaatagaaggaaaactcacctcaggttttccagttccaagggcagattgtaactgagcaatttgtggagctttttaattctggattcctcagtaaatttaattctcagcacttcctttagatacctattaaaaaattttcaaaaaagaacagaacaaagaatcaccgatcaattcaccaaggcttgctgttcttggggctttggttaaacattcaatcccagcgcagtcacaatgccagtgggacccctctgactgccatgactgaggggaagaggagtggccttgggggttcgtggcattctaggaaggtgactttcttctgtcccttcacccgttcaatagcatttttgcataagccttctttcctggtttaggaattgacttttacacacaagaaagacttacttatgagacaagtatcaccagctgacaccctgcacttcagtgaactaggaagacctctgactactgtggcaaacaaatgctcacttatggtacttctgggagccaccactgtaaaactatgttaggaccaagtgatttgaccacttacttttccattgtgccaaaaagccattttggttccttattgaatggcattttcataccatgaaatgtagccattttctcggcgatttctgcagaaatatctggcaaacttaattcttcagtatctaatcgccggctctgaaaaagaaaagggagttaaaaactgacatttaccaagtaaactaaaaagagtgagatcacacagtcttaggaacgagaagtgtttttgtagtgcatttaagtctcacccaatgccccaaattcccttaagaatggacactgtgtccctacagacagtgacccagcaattgctatggcatttctacagtgaggagccggccacctccaaagatctatttcattttgaaccctttttaactatgagaactccttccttaaattttattgaactactacactatcatctattattctggcctctaaaaccacactgaatgtctattcactacccaatgctgaagtccatgtcttcagcagtttatcacatggccccacttccagctcctccatcagctgggacattctactctgatgtgttgcaggtgagatgtggggtccagaataggtcctaaccaggagatgcgtcacagagacaggggggccgtctccagctgctcccagtggtggtgtcagcacctggcctggcacagagcaggtgtccagggcaaagttgggcaaagaaacagtgtctagaggacttcctcctggcctctgcatcctgcacttcccctaaatcagcccgaggccatgcttgtttggctgcccttttacaggaggcccatgggagctcacaatcaactgagacctccagagcttcctcatgcaacctgccaccctgcagaaatctaaagagaggtttctgtgaaaatgcaaagaagtacagcacaggggtaagagtgaatgctcccaactcagggaaacctcagttgaaattgtggctttaattctcatttcaaagctacatggccatccaagttacctcatacatctgtgtgttcccatttctatcaaatgggaatcaggacatgaattctctcacagagttgccaggagagctggaggagagaatgcagatgaggtctctgggacagcacctagcccagggtgcagctcagcaagtggcagatgtctgctactgagagctaagagctcactgtaagcattggactcaaccttctattcaactccctccagaaagcactgtcaccacagcactgtcaacaaattaccatgctgcaataagaacagggcctccacttccagcagcaggacacacaggacttattaaggtagctcactcagctttcaaaactgccattaatttggcaacaaggaaaatctgaagctaacatgctcagatatgaacaaatctcagtattccaaattccttccccagtagagaaagagaaacagactacctactatccctagtggcccggctattctcacatgccctttgaaagatggctacaggaatcatgaaactaaatcacctgatcccaagcagtgaagagtaaacctaagccaggcgtggtggctcatgcctgtaatcccagcactttgggaggccaaggcgggaggactgcttgagcccaggagtttgagaccagcctgggcaacacagggagaccccgtctctacaaaaaaataaacaaaattagtcaaacatggtggcacgtgcctgtagtcccagctactcgggaggctgaggtgagaggatcacttgagcctgggaggttgaagctgcagtgagctgagatcaggccacttatacttcactatactgggcaatagagtgagaccctatcttaaaaaaaaaaaaaaaaaaaagcaaatctagaaataacatacggtattaggttgaatcaaatgaaactgccattcttgttggtcaaaaacagtcaaacaccggcggcgtcatatggttcaaacctagtatataacagaattttaaaaaaatcttcactatggctgggtgcagtggttcacacctgtaatcctggtgacttaggaggctgagacaggagaagagcttgaagccaggagagttcaagaccagccagggtaacacagcaagacccatctctacaaaaaaaaatttttaataagctgggtgtgctggtgtgcacctgtactcccagctacctgaaaggctaaggcagaaagatcacttgagtccaggagttcgaggctgcagtgagctatgatcatgctattgcactccagcctgggcaagagagtgagactcccatctcaaaaaatttaatatataataaacaatacatacaagagcatagatagaacttaagaactagaacaaaatcagttccacagatactataatctatgtgtcctgatgcctgccctttttgtccccaagatatttttattattctgaattgtgttaacacaattcccttaccttttccaaaaagagaacttttactacatgtgcacatattcttaaacaatttttaaaatttatcaggctttatagaatggtatgatactacttacagtctcctgcagtttgatcattcaacattatgtttgtaagattcacctatattgccacttataaccatatgaggttctattatttacaaaattctttcaaaaacttatcatctcggccgggcgcggtggttcacacctgtaatcccagcactttgggaggccaaggcgggtggatcacctgaggtcgggagttcgagaccagcctagccaacatggagaaaccctgtctctactaaaacatagccaggtgccagggagcaaactaaaggaaaaagccagcgcagtgaaggcaccatccactcatctaaacacatcctcagcactggcagctagcacaacactagcacagacggacagtgccactgtcaactagaagaggatacctcttctggggagacagagcacaactagcctctctgtttctgggctgtgggattagacaaagaaacccctgcccctggtccccagccagacgcagcagagcacccctctgccaggcatcctagtgctgggctccatctgcacagatgtacagggcagccctggacatgcccaggcctctcatggataagatatctcatgcagcagggcaggaaaagctagcagcttatgattctagtcctcaaggaacttacgctcaatgaaaatggggaatatctgatctatctaggaagagagtgcaggctgacaaagacgagcattgccaatcaaagaagtattgccagggctcagagccacacttcaacacttagggttcatgagaacctctgggcatgaagcattgtgcagggcatggagtcaggggtgggtgggtagaggaacaggacctatgctttagatatgtacatgtaactctaagacatggtatactggtaaatgttacagcaacattaaaactgccttgggacaataagaaagggaaaataatcctgactgcttagaaataagactgcaaggtcttggagcaaggccttgaaatctaagaatttgaccagcatatggggacaggaagatgggaggtagggagactcagtaggaatgcacaaaacaaaccaaggaagggtgatgggaaagaacaggcatggcccccacagggctacagtcagagactgagcagggccaaggtgttctagcagcaagttctataaagcagggccctagaagttgagaggaacacggtgaaaagggcaaagtctcagggtacacagcctcaggggacaataaaatggtaagtttcatatatatttcaaatttggatgaatacacctttacagaaaagaaagaggttcggatgtaagtacaaaataaatgttgcttttcatgatttctgatacagtttaatgacataggtgaggttaacagtgaaaacacagcattgcaggttcttgcagcaatgagacaaagaagccatcttctgtctgtggcatatgtcaactaagcgtttatgaacaaatcttaccgggatgaactgctccagtcggccttggggaaagatgccatagagttttggcccaagtgacctctctgcgagaatggcaaacataacgctctccagaaccatggcctcagccccctaaaacagatggcaacaaatcaggtgtttactgagtgtttgctaagcgccaggcatcagaagcactctcacaggagtgtttcatctgatcctcatgagtattctttcacgtgggcactactgttatcatcatccccattttaaatatgaagaaacagaggttccaaagtcacacatcgtgtcatttgcaggattcatgcttgcaagcactatgctatattgataagatttaaaatatgagtttaatttaggtcactagatccaaaaatagaaaaatatccatcagtgcttttattgcttctatttatttcgcaacctatataggagtctcacccttggtatctcaccaaaggccacaacaccatccattctggtaagggttgatttgcttttggttgagtgtgtctagttaaagcaaaggatccaaaggaccttctgcctactaaattgggctcatgggtccaacaagcttgaaaattactgatttaggtccagggtctacggctttctagtccaaagagcaccctagcatggagcatcctagattgctattttcagttggcacacccgaccttttcctgttattgaatgtttgttgtcttgctgaaatctctatgatgctgtctgttctatcttcgtcctaataattaacgtgggatctatcatcattttgccttcaaaatccatgctttgatctcaaagcaaattcagtccttggtctttcccccttaaacagcacattacagcataatggtttccatctgttggagtgaaggagtcacgcttacccagaggtccacctgaatctcttaaagagcttttacaggccaggcggtggctcatgcctgtaatcccaacactttgggaggctgaggtgggaggatcacttgaggccaggagttagagaccagcctgggcaacatagtgagatgccccaccaccaccgaagtctctttttaaaaaaaagagcttttgcaaagagattcctaggtcttactccaagtattaaaagagaggcaccagcagggctgttttgaaaaagctttcagatgattctaattcaccccctgtgaagcaatgtgctgtggaggaacatgatcccagagaaacctctaaaacacattcacgttaccaaaaactgagaaaccaagaggacaaacttattaggaaatgatacagtactatagtaagaagaaaacaaaaaagaaaagctacttccaaaggatatcagaccacattaaagcaaaaagtattttggtcacttttacattttgtgggggtaaatggatttgccggtaatccccccacaattatcgtctacaaccatcattcgtataatcctcacaattatggcctgtgatcttgtgaggctcaatctttcctaatttgtggttttgtgtatatgacaataaactgataacatctatctatcaagctaatgaattttagggtgggatttgatatcagacaggttttatttcttaaaaccttagagaatgaaaacaaagatctagtatctctatttagttgtcaaaaggtttccaagaactttttagtcctatggtagtgttgtccagagatgcagtccccatcttactccaagcccaacatcacagaaagtatccggggcatttaagcaagggtctgcaaagcctcctccaagtctctgcttagacattatgctcccctgctccccagggggcagcacggtcctggtgctctgaagactgtggtccccaccaccaccctcatgctgtgtaaaacacaaaagtaaacaggggctgggcatggcaggacaagggggtgctggactcggaagttcagcattttgcacatcatgtccactgggaaggattctcggaggtgactttatttacgtgtggcatcgtcaacacatgtcaccagcactagccagaatcctctccagagctgagtcaacccagaaaggacatagagaagagggaaagagatgtaagaactttccaattctctttagcactgccctaaacattgtaaacaaaaacacacttattcttacgtaatactgtagttcaatatttattcacagtaggaagaaagggggagatggtgtatggagagaaggatttggagaggaagaaaatgaggccgggtgcggtggctcacgcctgtaatcccagcatttcgggaggctgaggagggcagatcacctgaggtcaggagtttgagaccagcgtggccaacagggtgaaaccctgtctctaccaaaaaagtataaaaactatctgggcatggtggcgggcacctgtaatcccagctactcaggaggctgaggcaggagaatcgcctgaacatgggaggcagaggttgcagtgagccgagatcacaccactgcactccagcctgggtgacagagcaagactctgtctcaaaagaaaagaaaatgaaagagaacacccaggcacaagcaagaaaaatgacaggttaaggacagcagagaatcctagaataagtgtaccaactactggtggtcttcttgtcatcactatgtctccaggcaccttcctgattgctcctgaaagtgagcatggtaaaaagggggctggacagacatggctgggttctctcctgtaccacgcactggtttagccacagctggtgacagtggagggaaaattggtcctactttttcagatatctcaacttggaacaatttacttgggcttcagaaataaagactcattaatacatttgcctaaaacacacttactcaatgtctactatgtcctggcactgtgctaagcgccagggaaccaacaaagaacaagatacataaggcccctgcccacaacggggcttacatgacagagaaggagggatggggagagagagagaaatggacagtaagcaagtacacgcagctatggactgggctcactgccatgagggaaacaagggtgactggtgtggtggtgtgggtatttctaaggaggccacactgaactgacctgagatctgaggtgtgaaaagccacagcagccccatgggagcacagggccatgaggaaggaacaagtgtgacgccttcaaggaactgagaggcctgtctcactggaacaggacaatcaaggaaaaggaagagcagagcatgagattgccgggtggactggggcttacagataccaattcacaagtcctcaacatgttgttgatgtttacagctcacaaactgggttcgatcccctggggacagaagaggaggaaccagcacaggccttaaaatgccctttcttatgtgactgtcaccacagtaagaaagctttctacagggcaccctcgcatacacccccaaaacaaacactatccccacagcaatactcactctcacaactgggcaacacttattaatattttctactctatttcattttaaaaagcaatcaacatgctaacatttcatgccccactagaggttcacaagccacaacttgaaaaactggtttaagttcaggcagcaaaaagaggggccagggcagaaggcaaggtgaggcaggcgccactgccaggaaggagagtggtattccctaatggtgctgctaagtggccattagatttggcaatatggaacctgttggtgacaaaaaaaagaacagcttcagagtgatgggtggacagatgtcagattggagcatgtgaagagtgaacagaaacgggagagagaagtggttgagaatggaacaaggggtttaaactgacttttcactttatctatgaagtttcatttatttaaaacccaggaagaagagtattgatgttatgaacttcttgagaagacataacagcatttctgtggtatttcagccaaaaatgcataacctcaattgtgagaaaacactagacaagctgaaattgaggagacatttccaaaataacggatcagtactcttcacaagtataaagattacaaataacaaaagaattgttacaggctgaaaaagactaaagagaaatagccaatgcaatcttgagatctagctaaatctcgagacagaacaaaagaaaatatgcataggaaaacttctgaaattcaattcaggtcatagttcagttattattttttttttggagatattattattattattttttttttggagatggatagcccaggctggagtgcagtggcaagatctcggctcactgaagcctccgcctcctgggttcatgcgattctcctgcctcagcctcccgagtagctaggactataggcattcactaccaagcccagcttatttttgtatttttagtaaaaacagggtttcaccctgttggccaagctggtctcaaacttgtgaccccaagtgatcagctcacctcagcctcccaaagtgctgggattacagacgtttagttatcactattgcatcaacgttaatgtcctggttttgaccattgcactgtggttatgtgagatgttcgcattagggaagctgggtgaggggtgcatgggaaatctctgtactattttttttttcttttgagtcggagtttcgcactgtcgcccaggctggagtgcactggcacgatctcggctcactgcaagctctgcctcctaggttcacgccattctcctgcctcagcctcccaagtagctaggactacaggcgcccgccaccacgcctggctaattttttttgtatttttagtagagacggggtttcaccatgttagccaggatggtctcgatctcctgacctcgtgatccacccaccttggcctcccaaagtgctaggattacggcgtgagccaccatgcccggcctctctgtactattcttgaaattttttctgtaagtctaaaattggtatgaaataaaaggttaaaaataaattcatataaaattcacataaaaaagactgaaatcggccgggcgatttcatggcgagtttgaggggcatgtgagacatccgaggagagactgctagccaatggcattagttccaagtcgaggtcagggctggaggaagaatgtagcggccctttggcctatagatcaggtgaccgagggagacaggacaacatgagaagagggcctatggtcaaatcatggggcgccctagcatgtagacagccagatctgtactttgtgtctctgtgtcatggctgccctcaggagaggaaacatttcaaaagggtgggggtcatgtcaaatgctactgagaagtcaaaataaaatgagaactgaaaagtactttggatttagcatcacgcaggtcctggtgatccaccattttcagctaacaggatgtccaaaggcctctgcacaaagggcttggaatggttcacaacagattgtcaatcacttcccacccaaggacttcccagtcactgtcactccagagagcacaagttctagatcctctagcagggcacccagagcaagacacatgtaaaacaagccgctgaaaagtgtggaaaaaatatcatcactttcattccttttttatctcaaccgttttaatgtctatttcttgatttttttcttttttttttgcatttggtggggacgactcctgtcgcccaggctggagtgcagtggcacaatctcggtctactgcaacctccgcctcccaggttcaagtaattctcctgcctcagcctcccaagtagctggaattacaggtgcccaccactatgcctggctaatttttctattttcagtagagacggggtttcaccttgttggccaggctggtctcaaactcctgacctcatgatccacctgcctcagcctcccaaaatgctgggattacaggtgtgagccaccgcattcagcctatttcttgaccattttaataatcaatatacaattggtaaaagtgatgtggcgatgtgtgtatctacatcttagacccacgtatgttgggcatgtgtgcacatgcacccttctctgtgagcctgcacataatggcagagatgctcaaaaggtgcttacgctggggcatgcagaccaacaccccagacccctgcctctgaggctccatcggtcagtgctcttggcctcaagccatctgcacatgtgtgtttcagagagtggggtcacattctctaagtctaggaagaagcttttccaacttgggtatcatccataggaaaaaacattgctgttagcccatggaaaatgggtggccaccaaaaccactgggcagtgacccgcttcctgatgggaagtgtgggaacgaccagaaagggggtgagagaggcatcacagcagcggcagccagggcctcctcatcaggtaccacacacgaatgctcccctggctgccatctgccaacatccgaatgctgtttcgattgccataaagacaccaaacttccacagtctacactctcaggaggaatgaggaatacccaccgctcactcagtctccgtaaggtggcttctgatagatataccaagagcccctcctcgtagaaagatagatcaggattttccaagggtagataagaggcactgccaagccctggagtagcgaagggtggctaacactagttcacatctcacacagatgcagaaagactgaattacttacttgaaattcattttctttctgagcttgttcggatccctctttattacaggacctctatgaatgagaaaaaggaaacacttctggtgagatggggaacactaaacagacactaactttgcaaccaccagaacagtcagggtttacaaaacatcacaggtctttaaggaaggtttctcagcccaccgatgtgacgggcagcatctaatgcaccagcagcctccagcactagtaccaacaccttagaaagtgcttcattgctttacgagaaaagggatgtgccggtgagacccgatagctgcacgtctcacagccgccccatgtacctttcacaatttcattgttagaggaaagtcaatagagtgcactcttccaatcaggccttctaaagacaagcggtcaggctgagtctctcaccaatttagctacgtggttctctcaagtcaacctgcaagaacagggagtgtaaacatgcctgtggacagctgtggtcagcacagaacttggacagagaagaaagcgctgtgcaggcaggaaacctggcacaaaatctgtgcagacatgccctgccgactcgccactttcccagagtaacccctctagttcagccggtcaccagctcaagctgaactgttcctctaccataaagaggactgtgtgtatttaataaagtctctaaaattatttcatatattaatatattaagaaatacttatatcactttcctcaatgaaattgcaaatttatgataaccaggattctagcaataacaacacactagatcattaactaccataaacaacccttgggctacattctttctcatggtacagatcatatattttaagagcaaccccccaccccaaatgctttaaaatccttcgtactatctttaataagggaatggggaaaagtaaagtcagaaacttgtgtcacgtcaaacttttatactcaaatactgcctctaaaaatgttacttgttaaattaaactaagtctgcttaagccagacacaaaaggaatcccagaaaggaaacctctttaaaaaaatttaaggtaacagattcttgaacaccccatgaaaaacatacctttccattccacagctttatcaaaaatacctgtaccaagggtggaaagtgtggacaggaaaaaaaatgccacgttaagcaacaccagctactctagcaccaatcaaaaacctagtgatttaaagcaaccactcatccatcacacactgaaataacattacagacgttttaatgcatgttttgtataaacagtacatgtaatataaaagtaaacaaaataagtatccatgttcataaatctatttgcaaaaggctcttaacgtttgcactgatacatattcaatactatatttagcatacagttaagtacatttggtacaaagtacagaaagtacaaatggggatttatgatattttcatttgtgtaatctgcagttctctgatgaaaagatgttacaggttaaatcccgttacaatgaaagctataaaaatcaaaatactacaaaaatgctttcagatctttgcagatggtttgatgtgcgatgtggtaggcgctggaaagcttcccttcaccctaattccaaacactctcgtggccgcatcgttccttagactctgctttgcgggtcgcctcttccaagcagtctgtaaattcctaatgaatagggactgcgtcttttattgatgttagtcttctcccagagcaccaagcaaatctcgatgcccactacactttttaggctgcatgaataaatgaacactccggagtggtatagcacgaggcaagtgagcccaacgagctgcctggtgccacgcagccaaccagtgatagcaaattcccatccagggtcttggtaacaaggaagctggctgtggggttaattagaaatgccccttcaaaagtccttgtgtttttttctccaaagaaacttaagaacaaaaaagttctataatctgatatattacatattaatactttgcagtataagctttaagacaaataagttagatactcttctgaaattgttgtaacgggatttgacctgtacacaattctaaatgactatggttattcctatgctgttgttactctaactgtatcttcttagggagatacagttaatgggttatttagccttcagaagtccctttcccttatctaatggcgctcgcaaaagcaagttacttcatccaaagttaaaaattggctgaggccccaaagtctttcctttttttaaacatattggcactataagtggtagtaaatccatgataatctcccctgcccactccctcactccacccccagatgaattcatcacttataccataagagcaccattatgaaggcaagatggacttctgcaatatccagccctctgttctgtttcctcagtacagaatgttcaggctccctaagtcctgtaaataagaagtgtaagacgaggaaatctcaaaccaagtgtatattcatggaaaggtaagagaataactttttcgtccaggaagacaggaagttaaatatattttggggccggcgggggtggcccatgcctgtaatcccagcactttgggaggctgaggcaggtggatcatctcaggtcaggagcttgagatcagcctggccaacatggtgaaactccaactctactaaaaatacaaaaaaattagccgggcatagtggcgcatgcctgtaatcccagctactcaggaggctgaggcaggagaatcgcttgaatccgggaagaagaggttgtagtgagccaagatcacgccactgcactccagcctgggtgacaagagcaaaactctgactcaaaaaaaaaaaaaaatacatatatacgtatatatacacatatatatacgtatatgtgtatatacatgtgtatatatatacacatatacgtatatatatgtgtatatatatatacacatatatacgtatatgtgtatatatatacacacatatacgtatatatgtgtatatatatatacacatatatatacgtatatatatgtgtgtatatatatataggaatccgtgggattttacttcagtgacataaattcatttgaagtagatattaaaatacattgtataaatatttagtatgacatccaacttttctctaacaagttaataaaaattatcctctataagttataaaacaaaactaagctttttacatttattagaaatttgaacactggttatttaatattaagtaattattaaatttttttaatgtgaacattactgtggtcatttttaaaaaatcatcttatatagatacagactgaaatatttacagaataatataacatctggaatttgcttcaaaataaccctggtggagtaaatgagggaaaagatggaagaagactggctgtgaggggaagatgaggaatggacactggggttcattatactcttctactttagggtatatctgaaattccccataataaaaacttttaaaaaataaacattgaaatttcaagacctaagaaatcagaatgtctcaattatgcctaagacacccaactccataaatacactgaaaaccactgaattctacacttaaaaggcacacaataatgaaaaatatattgccactggcttcctcccaccttctttctttccttcctattttgggcttagttttcaagagaatcttaagttagagtcatatattcattagcctgtgatgtaggaaacaaatgaggctacagtgacagcattaataaaggaggcatacttactattttaaagttagcttttaagaggtgaaactttaaaaaaaaaatttggagactgggtctcgctctgtctctcaggttggagtgcagtggcaggaatagggctcactgcagcctcaacctccccaggtcgagcaatcctcctgtattagcctcccaagtagcaggaccacaggcatgtgccaccatacctagcctttttttttttcttgtagagacaagatctcactatgttacccaggctgctcttgaattcctgagctcaagtgatcctcctgccacagtctcccaaagggctgagattacaggcatgagccaccatgaccagcctgaaaaagattttttgattggccaagaacttttaaatttaaaaactaaattcctgaaagtctgaattatattagctatggagtaaaatgagaaaatagaggactttcatttttactttatttctatactttaaaaagtgcttaaaagcgtgtattatttttataataaatacatttgatacaaggtttcaaatgttacttttctaacaaaattgcaatttaaggctttggggtttttttgtttgttttgttttttgtttttgagacagcgtctcactctgtcacccaggctagagtgcagtggtgcaatctcagctcactgcaacctccacctcctgggttcaagcgattctcccacctcagcctccggaatagttgggattacaggtgtgtgccaccacgcccggctatttaggctttgtattttaaatgagactatgaaaagcagtaaatattcatattacagagcacaggttttcaaaatgttctacttcatgctttaaaaataaaatgggccaggcacggtggctcacgcctgtaatcccaacactttgggaggccgaggcaggcggatcacgaggtcaagagatcgacaccatccttgccaacatggtgaaaccccttctctactaaaaatacaaaaattagctgggtgtggtgatgtgcgcctgtaagtctcagctactcgggaagctgaggcaggagaatcacttgaacccaggaggccgaggttgcagtgagccaagatcgcgccactgcaccccagcctggcgacagcgagactctgtctcataaaataaaaatacaataaaaaaaatcaataagtggtaagacaactccaggaccaaggaggaagagatgtccctttattgtattttgtgttatatgattttaggattcaaaaacctactttaagttacctaatgttccacaatatagcaggtatatttcttttaacctatttaagccatcagacagaataaacttatttggccagtacttaatgaaagacttctctaatactgagggaagtaggtttatgactaaatgaataaagccccatttgggagatgaaaacaaagcagcacctcagttttccctagagtctgtgtatagtaagaatgggtgaaagcggcataaagaaagtgtcattaagtcacatatagttatcatttaaatgtcatttggctgggcgtggtggctcacgcctgtaatcccaacactttgggaggccaagatgggcggatcacgaggtcaggggattgagaccatcctggctgacacagtgaaacaccgtctctactaaaaatacaaaaaattgcctggcgcggtggcgggcgcctgttgtcccagctactcgggaggctgaggcaggagaatggcgtgaacccgggaggcggagcttgcagtgagcagagatcgtgccacttcactccagcctgggcgacagagcgagactccgtctcaaaaaaaaaaaatgtcatttaaaacatctttaacacccaaaacatttatcttcaaagtatctttaaacgtccaatactacatgagctgctgtgagacagattttaaaaagtgatgaatcagctacaaagaatagcatgtcatcaatagcaaaataaattggaaatgctatttaagaaacgaaatcattatcaattatggataatataatatgagccaggcatggtggctcacattggtaaccttagcactttgggaggttgaggggggcggatcatttgaggtcaggagttcaaaaccatcctggccaacatggtgaaacccaatctctactaaaaatacaaaaaaattagccgggtctggtggcaagtgcctgtaatctcagctacttggaaggctgaggcgggagaatcgcttgaacctgggaggcagagattgtagtgagccaagatcacaccactgcactccagcctgggcaatagagtgagacttcatctcacacacacacacaaaaaaatcataatatagaatagaaataggtactatgttaaatataatggtggctgctgaactaaaatgatatataaataagagtacaggttttttatagaaaaaaaattgtgccatccattttttaatagaaaaaaagaaaaatacacacaaaaaaagaaaattaagaaacatggatgacattctcttcttcctaccaccccttcctcaccaaaaaataactaaatggatcattcagcttactgtctcttttaaaggctttacataaaacggtagattgattgtgaccttttaaaaatgctttgagacctataaataaataagtaagaataatcctgtctgggtgcagtggctcacgcctgtaatcccagcacgttgggaggccgaggtgggtggatcacctgaggttgggaatttgagaccagcctgaccaacatggtgaaaccctgtctctacttaaaatacaaaaattagtcaggtatagtggcacatgcctgtaatcccagctactcaggggactgaggcataagaatcgcttgaacctgagaggcagaggttgccgcgagctaagatcacgccattgcactctagcttgggcgacagtgggaggctgtctcaaaaaaaaaaaaaaaaaaaaaaaaaaaattcctactgttagctagactcagtttcctcagtttctaggatatgtaaattttggtctcggaaaataatccatctttctactaatctggtattatcttcctgagctgagtactgaaacaactcccaggtcatcgtattcaccctgagaataggaggatatggtgcatcattcggattcaattcagtagctgtgatgcccatttggtcttggagtggcatgaacttctttactgtgtagcctgtggcttcggagacccttaatacccaccctggttatctcaccacactcaaccctctaggagagaaataatttttaatacaggggtggcatctgttataatccctggcctgccaagtccctgttgatgatgaagctatgttccatctcaggagaggtggggcaggaaaaagcatgagaaccatgactctatagaatgtgttcaattctatagaattgaaagagttatgtgactctttcaattaacattttgcagtatattttcttggcaatatgttttcttctcagagttatcatggaccctaaccttacttcttcctgatttctatgaaaaaaaatgaaatcatcccgtatttcttgcttttatggtttcttacagcattctttctcgaactcctgacctcagtgatccaactcgcctcagcctcccaaagtgctgggattacaggtgtgagccactatgcccggccacttttagcactttctgaaaacattttacagaacacattaaaatgtgagatctcaatgcaatgatttaaagtatagcttatgtgattatttaataagcacatatgaattacaagaatttaaacagataagtgatttctaacattttatggtagtctctagagtgtcttcaattatcccaaggaccagcctaaaacaccttgatctttttggacattaataatttcaaaattggatgacttgatgaatatccgtaggaaactagaacttctaaaacactttaggcaacacaagccagcagaaagacaggtgagtggaagcccaggttttaaaaaggcctatttcaggaccttctcaaaatctatgtctgatctagggcaacctgctgacccaacactcctcagacttccaagactaaataaaataccctccctctaagtatcccaaaggttgacttgcaagcaacacttttacgggaagtgtgccttcactacatcaagtcagcactgcagagctccctaaggtctcaggtacccagctaagacatatgaaagtatactgactggtaaggacaaagaagaaggtttgtttctaattctgaccaaaatatcaaaatatatatggtgtctccttaatgctggaagtgatatgaaggaagaacttgattacttcaattaagttatcaagttgaggcccataaatttctaaaattcctaaatgtttgtcattttctactgaggaaacagaagaaaggaatctgatttgctttggacaaaaaaaataagtgatatatttattacacaacattctgaaatcttaatcactgtacctctttaagcacagcacaaactgtagctggtgctacttaacaagcattacaactttcttttttaaaagcaattcttgaatccaagaactaaaagaaagaaattaaagctgtagagaatgctccaacttcagaggtctcatactataccgtgaatcgtgtctgtcacctggaaaccagagtgctccaggcacgatcgcatggacaagcctgcagcagagaacacatgcacatacagctaaagtggtacattacccccaacgcccttcactccacccaacataaagacattccttcccaaagaggggtgggctgcggtcaaaccatcgttccatggaccagaaatccgcattggcttcatgctataaatcccaaacatttaataccagcaagacaaagacactctgaatatgtaaaaattagacatagtagtctgtggtttatttggttatcaaaagaaggcaccaaagcaggtatggaaggactattggtagtaatttggcaactatcttgggagagtatcagctaaagaaatattaggttagaccaaatgggaacgcacaacactagaaaaatgttttacttctgagaaggaagttttgactgccttaggaacacagaattaaaccatactcaaaagtataagggaatttttttaaagcagagtgaacagaacaacttaaattcctaatgatcctaacacaatgaggaaaacagtggcaattcatagaattcagttaccagggacatgactccttcaaggagtaccagcaatgctggtctttgcatggtgtgaccttagtaacataaagaaataggttttagcagctgatttctcagtagctggtagtttaatattaactatttatgagttattccatattttattgtggcttaatttttaattaaactggggctaagagaaaatagggaggaagacatttgttttctagatttaaaaaggacagtgtctcaaatttgactcttttaagttgctaatacatatctgcgttgtgccttgatgcctttattatggttagtactcaaacaagcactaatattagccttctattactcaaaaaacaaacaaaaacaattttccagacaacattcaagagagatctttgatgtgtattataaacgttcatgcctgtgagaccgctcataacggtgaggccaaatctctccactcatgcacagaaggaagtggcttaacacagagtcactgttctgacagaggaagggacaaagcaatcctctgagacttccgccaactggcacaggttacattgaatgaacaatacgtactgacatttgtgtcttccacaattcatgataaataagcaaactggttatttgtaatcagccaaacttgcttctctgaaaaggctgctactggacgttgcagagctcatgttccttcccagtatcagaaaggaaaaaaatcaagttacatttatagctaattttatacatttacgctctcttctagcaattctatctctttccacaatgcaaaggctgaactattacttctcaaaacttctattaaattatcctcctttagttcagggtagttttacagttgagtttggttttcataatctatgtagctaatgaaaataatctcatttccattaaaattaaagacagtctatgtaaaacagacgctaaattatactcacatgcattaagatcagaccaatatttttatgtttaataatttcctacaaataatattgtatagttgtgtgtgtcttatcttgttcatattttcaaaaggacccattcttgaccttgccaaacacaggaattttcataagcaccctaaaactaacacaaatactaaacaaaaactccaggatacagtcaggaagtttgtttccgtctcatcttagatagaaataggggctagaagagacagatgtttgtgggacagaagctgtggagctgaacccaatcagaaagttttaccttggctttctggcacttaacccttagagaactgtaccaaagagcagtcatttcagtgtcactatggaaataaaggaaatcagacatcttataatgccaagatgaagaaaaatgagaaagttgagaatcatctagttattttaaaccaagtcacctgtaaatcatttgctgatcaaagaacgtgtaaaatgttaccacctctgattctcacagaggtaaaatgttcaaaagctaaaaacaaggaagagaaatggaaagaagggacatactaaactaaatctgtcatataattaaggaaaaatgcaaaatactctgaaaaaatacatagacctattatttgtgcagtagacttcaattaacatttttcaaagaaggagtgaattctaacccatcttaaaggacattatagctgcatttataaagttggcttgggagataccagttatattgtataagtacacatacatgtataggatatgtgtatgctttcccataaggtagagcaaaaagaaggaaagcagaagacttgagtcatactatatttaattctctctttaaccatgatgtgatttattattgggggctctgtatttgctcagccacatctctcaattaatgcaaatcttgacaattttttatcaatcctgacaatttatcataaattctggctttttttgttgtgataggaacaaaaccctcattgtagaccataaatatctccttccattataggccagattcattctaaagagctggctatacattagcaatttcatcacagctagatcacagcaaaaataaataatagaaactttaaagctgatttgaaaatatttggaaaggaatttaaaatcctcggcacagtgtgtggcagctcagcttctaaagcacacagcagctgttgcctggctcgcatcttagaagcttctaagcctgttctctactttgcttcttttgtaccatagccatcttttggagttcttgattttggttcccctcctcatgttgtcacagtactcccaatgaccaacagtctccaatggccattaatatctgaaactcttaactggcaacaagtatgactgctaaactctgcagagctaggaaaccaaatatacttaactctgagactctaggcttcatggtttcctaagtttaaactacaaccaaaaaagtgtgtttgaactaaggactcgaccaactgaataattatattgaaaatatagattcccacctaagaagcaaagaaatagtttttttctaacaaaaatcagtttgttgtctatgtcaactgtcagattgttagaggtatgcttattatccgtatagaaaactactaatttcccatccagttttttttgggttttttttttttttttttgagacggggtctctctctgtcccccaggctgcagtgcagtggcatgatcttggctcactgcaatctccacctcctgggcttaagagatcttctcacctcagcctccaaagttgctgggaccacaggcacatgccaccacgcccagctatttttttatagagatagggtttggccatgttgcccaggctggtttcaaactcctggactcaagcaatccacctgccttggcctcccaaagtgttggaattacaggagtgagccaccatgaccagccctaatttccctttctatccaaggtgctttcaagtatggtttctaccttacatcagtagatatagcttcaggaatggaaactcatttaacatttgcctaataaaaatataactgagaagctaaatgtagggtacctcctccccccaaattggaattatatgtaaaacatactccattctattagtttggtaagagctaattacattttaagtggcttaaattattctttttatttttcttagttacttaatagtcttttttcttagaaataaatcgggacatagaattctgttcaaacaaattttatttccagacatttctactgtatttaactactgtcaggtactacttccagactgctaaaatttcaaaatggaagaaagactaacaattgacaatgaatctttattagaggaaggctaattgccaagtagtaggctatgctgcagctggcttttactaagtgactcatataataaaccagaacattctagagttgggctgtccaatacagtggccacgagctacatgtgactattttaatttaaattaattaaaattaaaaacaatttaaaactcagttcaacagccacacttgccacattccacatattcgttagtgacatgtggctgatgacgagtgtatcagacagcacagatgcagaaccctccattactcccatcactatagcactgttctagagcacaggattaaactcccaggttagtctagcccacagaggagcaccttgtaacacatttaaaatgcttcttaagttagaaatgaaagcctcataaatcagatttaaacaatagttttaaatcacatgtaatttcagcatctacttattattgtaaaagtgttgtataaatgcaaaacacaaaaaacagcagaaatgggacttaatcgttgcagaacgtaaacagtcctcaaagaaaaaatgactatcaagacatagcaggccaagtgcagtggttcatgcctgtaatcctagcattttgagaggactagacgggtgcatcacttaaggccaggagtttgagaccatcctgggaaacatggtgaaaccctgcctctacaaaaaatacaaaattagctgggcgtggtggctcactcctgtagtcccagctactcaggaggctgaggtgggaggatcacctgagcccaggaggtcgaggctgcagtgagccatggttgtgccactacactacagcctgggtggcaaagtgagatcctgtctcaaaaaataaaggcacaccagtaaaagtgccaaaataatgatgaaagatttcaaaaactatactttgaaactgcaacctgattaaatttaaaacccaagctgcatggtgaacacaagaatcttttctgcttgtgtattaacagcaaggggtctgtgttttcagctggcatcaactgttgtcctagctggatgccagctatctgcacctaatgacaaagtgacctcagatatcctcagcaagtgcacacgtgtgtggaatagctacgtaccttcaaacatactaacttgttcccagcatttttagatcttaaccatttccacagcttgacagagtcaaggaaaagctatccaattaaagggtttcttcacattatgacaatttttttaatgaattaacatctagactgccaatttgaactttaatatttctaaacatataatcaaatatcatatggatatgatctactttttagattgagctgaaataggccggtcttttaaaaaatttagtttgaaaactactctgctctatttcattaagataaaaatgggcccttccaaagaagattaaaatggatatcagggccaggcgcggtggctcatgcctgtaatcccagtactttgtgaggccaaggcgggcaggtcacaaggtcaggagatcgaaaccatcctggctaacatggtgaaacctcatctctactaaaaatacaaaaattagccaggcgtggtggcggacacctgtagtcccagctacttgaaaggctgaggcaggagaatggcgtgaacccaggaggcgcagcttgcagtgagctgagattgcaccactgcactccagcctgggcaacagagcaagactccatctcaaaaaaaaaaaaaaaaaaaaaaaaaaagccaggcacggtggctcacacctataatcccagcactttggaggccaaggtggacggatcacgaggtcaggagatcgagaccatcctggctaacacggtgaaaccccgtctctactaaaaatacaaaaagtgagccaggcgtggtggcaggcacctgtagtcccagctactcaggaggctgaggcaggagaatggcgtgaacccgggaggcagagtttgcagtaagccgagattgcaccactgcacaccagcctgggtgacagagcaagactccgtcgcaaaaaaaaaaaaaaaaaaaaaaaaaacaacaggtatcaaaatcctaccacaggccaggcgtggtggctcacacctgtaatcccagcaccgcgagagggtgaggcgggcagatcacctgaggtcacaagtttgagaccagcctggccaacatggtgaaaccctgtctctactaaaaatacaaaaattaggcgggtgtagtggcacacccataatcccagctactcggaaagctgaggcaggagaatggcttgaacccgggaggcagaggctgcagtgagccgagatcgtgccactgcattccagcctgagctacacagccagactccatctcaggaaaaaaaaaaaaaattctaccacagaaatacctcaacctggccgggtgcggtggctcatgcctgtaatcccagcactttgggggaccacggcgggtggatcacttgaggtcaggagtttgagaccagcctgaccaacatggtgaaaccccgtctctactaaaaaagtacaaaattagccaggcgtggtggcatgcataacgtcagctacttgggaggcttaggcaggagaatcacttgaacccgggaggcagaggttgcagtgagctgagatcacgccattgcactccagcctgggcaacaagagtgaaactccatctcaaaaatatatatatcaacctaatatttctaccgtgctcaatgaaatagtaaattcatgacattaataataataataataaacccagacaagttgggatatcctataactggataattcaataggtactttaagaattagattatctaatataaaactttagaaagattatgactgtaacaaacaactcaaagttttaaagaaatctcagagaaacagttattaaattcagcttcgttgagatcatactttgttaactgggactatcctctaaaatcttttggataatgttataaaaacaataccttctccacattagaactttataatctaaatctgagctgaaaattttaatcaatatgtagaaccaagaatcatcaagcactattgaagatttaaccaacattgtaccttctctggatgtaaaactgggaatacttgcactagtttactaataaataataactaaaaaaaacacgaattaacttagaatgcaaaccaagctgtgcagcccaattaaagtaaaagtaaaagcaatatactcaaatatctttagtaacaccattaaagtatttaaaatctctttccaaggtatctcagcaaagaggatttaaaatgttaacaggatccccccctcccaaagtagcctaccaactcaccatctgcaaaatcgctccatacagccgcaggagcactttccgaggctcatcaccaagggtggctgtggtgtcaggtagggagcactggaacagcatgttgctaaggccgcctctgtcagaaataagaggacagtaagtatctttattgcaggtgagctaaatcactcttcttggataaatatggatgaaaagtcagggttacacaagaactgttctcatcttatctcgatttattctctcaatttaactccatgagtcacattaaaaacagacaaattccctttctgtttttctgcagtagaggtggggaagcgtttttgaaattgcccgtgtgggccgggcacggtggctcacgcctgtaatcccagcactttgggaggccgaggcgggtggatcacaaggtcaaggaatctagaccatcctggctaacacggtgaaaccccgtctctactaaaaaaatacaaaaaattagccaggcgtggtggcaggtgcctgtagtcccagcaactcaggaggctgaggcaggagaatggcatgaacccgggaggcgaagcttgcagtgagccgagatggcaccactgcactccagcctgggcgacagagcaagactccgtctcaaaaaaaaaaaaaaaaaaatcttgaggcaatatttaaaccttcttctctagggctttccatttgatatgtattaatagttccaagatcttctacgctagtgttactaaaaatctgtcaactgattttgactaggagcttgttcaaaaaactcccaacattaactggttaccacggccttcagatgaaacaggagacctcaatactctaatcacacaccaagtaagtagctaagcaaggaatcaaacccaggcatatggctcgagtccctgcttgtaactaaccatgaagagttgtcaaagagataggaggcaaagctggagagcaccatgtgccacattaaagacattacaggaggtcgggcgcagtggctcatgcctgtaatcccagcactttgggaggccaaggcaggtggatcacctgaggtcaagagtttgacaccagcctggccaacatggtgaaagcctgtctctactaaaaatataaattagccgggtgtggtggcacacaccttgtaataccagctacttgagaggctgaggcagaagaatcgcttgaacccaggaggcagaggttgcagtgagccgttatcgcgccactgtactccagcctgggcgacagagtgagactcctatctcaaaaaaaaaaaaaaaaaaaaagaaaaagaaaagataaaagaaaaatgtcataggagctgcgtgagctgcaaaatcaccttccatcaggactactctctataaacctctatgacacaaacatctccatgtcctattactgctataacaaattactacaaatttagtggcttaaaactgaaaacagattctgatcgagctcattaatttttaaaaataagggtaactaggtggaaatggggagttggtttaagtttaatgggtacagagtttcagtttgggaagacgacaacattctggagacggatggtggtgatggcagcacaacaatgaatgtacttaatgccactaaactatatatttttaaattgttaaaattgtatttttaatgctgcttattttaccacaattttacttgattttatttatttatttatttttttcagagagggttttgctctgtcatccaggctagagtacagtggcacaatctcggctcactgcaacctccaccacccaggttcaagcgattctcctgcctcagccccccaagtagctgggattacaggtgtatgccagcatgcttagctaatttttgtatttttggtagaaacggagttttgccaggctgctctggaactcctgacctcaggtgatccacccatctcggcctcccaaagtgctagaattacaggcacaccatgcctgaccttattttaccacagttttaataaaaaagtatgaagtactgatatatactacaacatgaaacttaaaaacattatgctaagtgaaagaagacagtcacaaaagaccacatgttatatgattccattcatatgaactgtccagaacaaggaaatctataaagtccattagtggttgccaggagctggggtgggaaggggtacttaggggtaggggatgatagctaaaagtttctttttgaaagatgaaaatgttctaaaactgactgtggtaacagctgcaagtatctgtgattacactaaaagccactggactgtacaatttaaatgggtgaattgtatggtttgtgaactatatctcattttcttaccaaataaaaaatttgaatgtgcttctagcacaaacaattttttcccagatttaagtaagacatatttaagaggttttttcaaaggttacttaaaatgaaaaaccatcatgagtctctaggaacaagacagcaagagtcaggatctattttcccagaaggttgtctaccttagttaaaaagaacaaaaataaaagggaacccaaagttcttgttttcccaaagcaagctgtgaagcaggccgacagcgtgtagatcaaaggaaccaaaagcagccttaacctttctgttaaacttggcgtggcgcctcaactgtgtggcttatcagaatccccctgccgcgtctggtcacagccaacatgggtttctggctaccaagcaacagaacgggcattaaaacagagttaaaagccctagtttttcttccggtcacatactctggaaatctcagtcaaatgcaaaggcaaacagatgaagtactgttctaaattgtgtaacctgattcaaagtttacccccgtactgctaaagaaggaaggcagactagcttggccagaaacaagctcacaacctggaaacccttcaactgctttttattacctgtagcctctattgttcaataggttttagtgaataaattgtcaattattttttagtgacagtcaaaataaatgaagcaaggtgactggcaccaataacccaaactgtgagaaatttacctagaaaaaaagccaactaccaatgagtcaaataataatatgaccaggaacaataaaatgtggtaggaagaaatgccagaaatggtagcaaaaatgtaacagttcaatttatcatataatttgtcaaaaatatcctcccaagtaaaaccccaggagctctcaaggatttgcaagaagttttgaaaccacaaactttatcacctggcataatagctttataagtcataattagatatgagaggcatgggctggatgtggcggctcacgcctgtaatcctagcactttgggaggctgaggcgggcagatcacttgaggtcaggagttcaagaccagcctggccaacatggtgaaaccctgtctctactaaaaatacaaaaattagccgggcatggtggcacgtgcctgtaatcccagctactcaggaggctgaggcaggagaactacttgaacccgagaggcagagattgcagtgagccgagattgtgccattgcactccagcctgggggacaagaacgaaacatcatctccaataaataaatacataaataaataaataaataaataaataaatacaagagcgaaacatcatctccaataaataaataaataaatttaaatatatatatgcacacacacacacatatatatgagaggcacaagatactcaagcaaaatctcaaatacagtgacaataacacacttattccacactcaacacaatgacaggaaggaaacagaaaaaagcaggaagtacctgctggcaggaattctcacccctgccctccagacccagtggtgcacgcatcactaactgtcaacccatgattccttaaaacagaatactaagggaataacaagcagtataaagaggttcttttttttttttttttttttttttttttgagacggagtctcactctgtcacccaggctggagtgcaacagcgcgatctcggctcactgcaagctccacctcccaggttcacaccattctcctgcctcagcctcccaagtagctgggactacaggcgcccaccaccacaccgggctaatttttttgtatttttagtagagacggggtttcaccgtgttagccaggatggtctcgatctcctgacctcatgatctacctgtctcagccccccaaagtgctgggattacaggcgtgagccaccacgctggtccaaagaggttattttacataaattgttgagcaaaaatgaaatgaatcatttcagcttctcttgatagccagaaaaacaaggcaagagaaagaaataaaaggcatccaaattggaaatgaagttaaattatccctgtttgcagacaacatgatcttacatatagaaaaccctaaagaccccaccaaaaaactatgagaactaataagttcagtaagattgcaggatacaaaatcaacatacaaaaatcagtagcagtattatttctaaacgggaggctcaggtgggaagatcacttgagcccaggaggtcaaggctggagtgagctgtgatcacgccactgcatgccagctaatagcaaattatctggaatggaaatcaagaaaacaatcctgtttacaatagctaacaaaaaaaaaaagaaaagaaaaagaaagaaatttaaccaaggaggtgaaagagctctgcaatgaaaactttaaaatattgatcagagaaactgaagacacaaataaatggaacaatatcccatgttcatgtattagaagaattaatattgttaaaatgtccatactggccaagcgcgtggctgacgcctgtaatcccaacactttgggaggctgaggtgggctgatcacctgaggccaggagttcaagaccagcctcgccaacatgataaaatcctgcctctactaaaaatacaaaaattagctgggcatggtggtgggcgcctgtaatcccagctactcgggaggctgaggcaggagaatctcttgaactcaggaggcggaggtggcagtgagccaagatcacgccactgcactccagcctgggtgacagagcaagactctgtctcaaaaaaaaaaaaagaaaaaaaaaagtccatactacccaaagcaatctatacattcaatgcaatccctatcaaaataccaatgacattcttcatagaaataggaaaaccaatcctaaaatttatatgaaatcacaaaagaccccagtagccaaagcaatctggagcaaaaagaacaaagctagaggaatcacactacctaacttcaacatatactacaaagtcatagtaaccaaaacagcatggtgttggcataaaaacagacagagaccaatataacagaataaaagcccacaaattaatccacacttacagctacctgattttcaacaagtgtcaagaacacaatagggaaaaagacagtctcttcaataaacagtgttgggaaaactggatatcgcacgcacaagaatgaaattagatccttatctcacaccatatacaaaaataaactccaaaatggatcgaaaacttaaagtaagacctgaaactatgaaactgccataagaaaacatagggaaaaagcttcatgaccttggtctgagccaggaattttttttaaaagacctcaaaagcacaggcaacacaaacaaaaataaacaaataggattatagcagactaaaaagcttctgcacagcaaaggaaacaagagtgaagaaacaacctacagaatggaagaatctatttgcaaactatacatcagttaaggggataatatagaaaatatacaaggaactcacagcaaagaaaggaaaggaaaccaattaaaaaatggacaccagctactcaagaggctgaggcaagaggatcactagagcccaggaagtcaaggctgcactgtactttagcctgggtgacagagcaagaccctgtttaaaaaaaaaaaaatatatttgccctaaatggtggcgtgtgcctatattcccagcttgggaggctgacataggaggattgtttgagcctaagagtttgaggctgaagtaagctatgaatgcaccactgtactccagcctggatgacagagcaagattccatccctcaataacaaaaacaaggcaaaagacccaacagacatttatcaaaagatgacaaataaatggccagaaagccacatgtggtaggtagcacgtgcctgcagtcccaactactcgggaggttgagatgggaggatcacttgagcctgggaggttgaggctgcaaatgagctgtgattgtgctactgcactccagcctgggtgacggagcaagaccctgtctcagtaaatttaaaaaaaataaaataaatggccaacaggtatatgaaaaaatgctgaccaccactagtcattattagactgtctattttcaatgataaaagataacaaacgttgacaaggatgtggagaaaagggaacccttacacactgttgatggcaatgtaagttagtacagatatgaaaaacagtatgcagggtcctcagaaaattaaaaatagaattaccattaagatccagctcctgctcatcaaagcaagtttaaaaaaaaaaaatccaggcttggtgcagtggctcatgcgtgtaatccccgcactttggaaggctgaggcgggcagatcacctgaggtcgggaattcgagatcagcctggccaacatggtgaaactctgtctctattaaaaaaacaaaaaaattagccacgcatggtggtgtacatctgtaatcccagctatttgtgaggaggaagcacgagaatcacttgaacccgggaggcagtgttgcagtgagccgagatcacaccactgcactccagcctgggagacagagcaaggctcagtctcaaaaaaataaaaaataaataaattaattaaataaaataaaaaattaaaaatccagcaatcccattactggtaatacatccagaggaaatgaaatcagtacatcagacatctacactctcatgtatattgcagcactagtcacaaaagccatcaattgattatagaataaatgtaagtgtccatcaacagatgaataaagaaaatgtggtatatatacacagtagaatcctattaagccttataaaagcaggaaattctgtcatttgtgacaatatggatgaacctggaggacagtacttatattaagcaaagtaagtcaggcacagaaagacagtaacaatgtgatctcacttgtgtagaatctaaaaaagttgatctcatagaagttgagaatagtgcttaccagaggcgaggggaggggagacagggagaggttggccaactggtacaatattatagtcagatggaaggaataaattcaccttatacctcataaataggacaattattattattattattttttgagactgagttttgctctatcatccaggctggagtgcaatggtgcaatctcggctcaccgcaacctccgcctctcaggtttaagcggttctcatgcattagtctcctgagtagctaggattcaggctcccactaccatgcccagctaataatttttgtatttttagtacagatagggttgcaccatgttggtcagctggtctcgaactcctgacctcaagtgatccaaccgcctcggcctcccaaattgctgggataacaggcgtgagccaccgcacccgaccaatatgtacaattattacatgtcaattataaacattatgaataatgctccattgcctcagcacttacatcaaatacacaggttataaaattataaaattctggccgggcacagtggctcacgcctggaatcccagcactttgggaggcaaagacgggcagatcatctgaggtcaggagttcaagaccagcctgatcaacatggtgaaaccctgtctctactaaaaatacaaaattagccaggcgtggtggcacatgtctgtaatctcagctactcaggaggctgaggcaggagaatcgcttgaacccgggagatggaggctgcagtgagttgagatcgtaccattgcactccagcctcggcaacagagtgaaactccatctcaaaaaaaaaaagagattatttaatgcctgttacattctatagcactataaaacaagaaaaacccatgctacatgctacagtgatacaacaacttagtaggctgcccaaggtcttgaaatatgtcatctctaggccggacatggtggctcacgcctgtaatcccagcactttgggaggctgaggcgggtggatcatgaggtcaggaattcaagaccagcctggcaaacacggtgaaaccccatctctactaaaaatacaaaaattagctgggcatggtggcagacacctatagtcccaactactcaggaggctgaggcaagagaatcgcttaaacacgggaggaggaggttgcagtgagccgaaatcgggccactgtactccagcctgggcagcagagtgagactccatctcaaaaaaaaaaaaaaaaaaaaaaaaaagaaaagaaaaagaaagaaatatgccatctctaatgtcaaacatctacctatttttaattatttgggttttttcccctgtcatttttagcaacggggatattttgggattcatgtatgtgaatccgctgaatgaatgcttaggcagatgacaaacctgaggaactgtctgctccaacctgtaacacaaagatttccacctgataaattaagataagaagttacctaaccaactatattttgctgaaaagcaaaaaagccactgaaagctccgcaaactgtctacaagtcacagggtacccagtctagcacatacagggcttagtccccaaggctgagggcctggacctaggagaaaatagagcaggcagttccatgactatcatctaaaagtcaaaatgactagaaagaaaaaaaaatcacgacataaccagtgtctcaacagagaaatgatctttaagccatagggctggctacatggaaaagagaatacagcgtaatatcaaaacagctactgaatttagagcacaaggaaaataagaaaaaaaagcagatttttgaaaaatttcttctaaccatctaaaattcaaattgcagctatggctcaggtgaaaaaaacagtgctgcagtaaaacatcagcacctctacggagtaatcaggacggtattaacccccacctctctgaaaacaagaaaagccaggaggtaccattaaaagaacaggctaggccaagcacagtggctaacacctataatcaatctcaacacttcaggaggtcaaggtgaaaggattgcttcagcccaagagctggagaccagcctaggcaacataacaagactcgatctctacaatttttttttttaattggccaggcatggtggcattgagcctgtggtcccaggtacttgggaagttgaggtgggatgactgcttgagcctggaaggttggggctgcagtgagccgtgatcacgtcactgcactccagcctgggcaacacaaaaaccctgcctccaaaaaaaaaaaaagaccagtccagcccaggtggagtgctggctctgcacaaaatagctgtgcagaccttgggcaggcctccaagtctgttttcacaccataaaacaatgtagcagtatctaacagaagtttctgcgaaaattacatgagatcatatgagctgttcacttatcagcaccaattgcaaagcaaaggttaatgtttaagaggatgccagaaggaagaaaggataaagctcagtcttaagaattctactccagcacggctcagccttgacgctttgtatctggggccaggtcattctttgctgaggggcaaagctgccctgtgtactgcaggaatgtttagcagcaacactgccctctattcactagatgccagctgtactaccaccaacatggtaacaataaaaaacatgttcggccgggcatggtggatcatacctgtaatcccagcactttgggaggccgaggtgggtggatcacgagatcaggagttcaagaccagcctggccaatatggtgaaaccccgtctctactaaaaatacaaaaattagccgggcgcagtggcaggcacctgtaatcccagctacttgggaggcttaggcaggagaatcgcttgaacctgagcagcagtgatttcaatgagtcaagattgagccactgcactccaacctgggtgacagagtgagactctgtctcaaaaaaaaaaatgttcaaacattaccaaatggcgagatgcgggtacaaaatcaccccactattcctctactttttttatcattctttctgcagtttttacctatttttccttccccaaaatttgaaaaccaatttgttctctaacttgattcccaacttataatcttttccttcctctattcaaaataatttcttcctcctgatttgcctatttcagttaacagtagtgcctttttcccactcacccaggctcaaaatcttcctcgtttccaatggcctggtcctctccctatctcccaaattctctcctcctttccattctcaatgctcctgcccaaatgtatatcctcccccaacccccactacagcagcctcctctctggtctcccagcttcttgatccctctctcctctatgctatcccctaggccaccttagaaagtgtttctaaaatacaaatttcaagccgccactgtccttagcacagtccttggaacacagcatgcctctgcctacccttcccacctaggaggtccttccaccaggcatggtcagaagtactccctcccactttctcataaagtgcttgcatcccttctagcccacgctgactcccagtcaatactcgacaaaaagagtactaggcacattaagatgtgtaaatacattacgaaagacacggaaattacgatctcattgtggaaaactaaagataagggttgtgccccaccacgcagcagaacgaggagattccctgccactgacagagaatggagagatcctggaaggacgctagacaggctgacggggctccactggaggggaaaacaggaaggagaacgtgggcatcactgaaagcaatatatgacagataacagaagaagtgcttttattattattattatctaaattctactcctagctgggtgcagtggcacacacctgtagtcccagctaatgaggagggtgaggtgggatgatcgcttgagcccaggaattccaggctgcagttgagctatgatcccacaaatgcactccagactgggcaacaagagcaagaccctgtctcaaaaagaaagaaagaaaagaaataccactcaaccttctggtttccagtccagtatgtgtaagaagcttagaagtcgccacctgatcctaacaacatgtaaaaagctaaatcaactgaaaaatcaactcttaaagaaataaggtggctgggcgcagaggctcacgcctgtaatcccagcactttgggaggccaaggcgggaggatcacgaggtcaggagatcgagaccatcctggctaacacggtgaaactccgtctctactaaaaatacaaaaaattagcctggcgtggtggcgggcgcctgtagtcccagccacttgggaggctgaggcaagagaatggcgtgaacctgggaggcggagcttgcagtgagccaagatcatgccactgcactccagcctgggtgaccgcaaggctctgtctcaaaaaaaaagaaatgaggttaagggggaaactgctgcctcccaaattggacagacagaccggcagatacagagaatcacagtttactggagcaaaatcctccaccaaatcagcactagggtaggaaaaccttaactataactaacaaattgccggaggctcagtgtggacaactgtgagagtttaaaactccaggagacccaattactggggagccccattctttgacgagttttacctccaggagctctacgagttccttacagtgaaaactgagggggggaaaaaatcccttcatgcttccagcagagggaggggcaaagaaacctttccttttttcttttcctttttttttttttttttttttgagacagagtctcgctctgtcccccaggcaggagtgcagtggcgcgatctcggctcacagcaagctccacctcccgggttcacaccattctcctgcctcagcctcccgagtagctgggactacaggcgcccgccaccacactgggctaattttttgtatttttagtagagacggagtttcaccgtgttagccaggatggtctcgatctcctgacctcgtgatcctcccgcctcaggctcccaaagtgctgggattacaggcgtgagccaccgagcccggcctcttatatttttaaatacgacagaacattctgttcttaacaaggtctgccctcaggagaaattattttgccagtgtctaacctgttgggattttctcagagcctaaacttcctgagagagggcaaatacacaattccagccccctctggccattctgtcccacctaagcggggaggagaactaagaaaaatgggtaaagttcacagtctaggtgcacaggctcaccaaaagactgagacctcaccataggactataggttaaacattcaaaaatcaacaataggctggatgtggtggctcgtgcctgtagtccagcacctggggaggccaaggcaggtggaccacttgaggtcaggagttcaagaccagcctggccaacatggtgaaaccctgtctgtactgaaaatacaaaaattagctgaatgtgatggtgcacacctgtaatcccagctactcgggtgactgaggcatgagaattgcttgaatccagggagtagaggttgcagtgagccgaggtcacgccactgcactccagtgtgggtgacagagcgagactctgtctcaaaataaaaaataaaaaataaaatcaattaatataatctatcacatcaacaggctaaagaagaaaaatcacatgatcatatcaatagatggagaaaaactatctgacaaaatccaacacccactcatggtaaataataaactctcagaaaatgaggaatagagaggaacttcctcaacttgataaagaacatctataaaaaacctacagctaacattatacttgatgagaaagtcacagcttttctacgaagaacaggaacaaggtaacaatgttccccctcaccacttttttccaacatcataggaagtcctaactaataagaaaaggaaattaaaagtatacagattaggaagagagaaataaaactttgtagatgatatgattatctatgtagaaaatcagaaagaagtgaaaaaaaatttctggaataagagattatatagcaggactgcaagatacaaggttaatacataaaagtcaaccagtttcctacataccagtgacaaataagtggaatttgaaattaaaagcacattaccatttatatgagcacccccaaaaatgaaatacttatatataaatctaacaaaatgtgtattttgttatgtcactcaatgtgtattgagtcatgggtaggaagactcaatattatcaagatgtcggttcttcccaacttgatctgtagatttaatgcaatcccaatgaaaaccccagcaagttattttgtgaataccaacgaactgattctaaaatttacagggaagccaggcacagtggctcatgcttgtaatcccagcaatttgggaggccaaggtgggcagatcacttatggtcaggagttccgagaccagcctggcaaacatggtgaaaccctgtctctactaaaaatacaaaattagctgggcgtggtggcatgcacctataatcccagctactcgggaggctgaggcaggagaatcgcttgaatccaggaggcggaggttgcagtgagctgggatcacgccactgcactccagcctgggcaacagaatgagactccatctcaaaaaaaaaaaaaatgataataataataaagtttatcaggagaggcaaaaaacctagaatagccaatgaagaataaagtcagaggaccgacaatactcaacctcaagaatcattatgaagctacattaattaggccaggcgcggtggctcatgcctctaatcccagcactttgggaggccgagctgggcagattacctgaggtcaggagttcgagaccagcctggccaacatggtgaaaccctgtctctactaaaaatacaaaaattagctgggcgtggtggtgggcgcctgtaaccccagctactggggaagttgaggcaggaaaattgcttgaacctgggaggcagaggttgcagtgagccgagatcgtgccattgcactccagcctgggcaacaaaagccaaactccatctcaagaaaaaaaaaaaaaatgagccaggtatggtggtacacacctgtaatcccagctactcaggaggctgaggcatgagaatcacttgaacccgggagacagaggttgcagtgagccaagatcatgccattgtactccagccaagacactatctcaaaaaataaaaataaaaaagctacattaattaaaacagtgtggtattggcaaaagaaaggacaaatggatcaatggaacagactagagagtacagaaatacactcacatagtcaacagatctttcacaaaggagcaaaggcaatacaatgtaacaaatgtcttttacaacaaaccatttgttgtttcaacaaatggtcctggaacatgcccggagcggtagctcacacctgtaatcccagcactttgggaggctgaggcgggtggatcacttgaggtcaggagtttgagaccagcctgaccaacatgaagaaaccccgtctctactaaaaatacaaaattagccaggcgtggtgacgcatgcctgtaatcccagctactcaggaggctgaggcaggagaatcgcttgaacctgggaggtggaggttgcggtgagccgagatcacgccattgcattccagcctgggcaacaacagcaaaactccgtctcaaaaaaaaaaaaaaaaaaaaaaaaagtcctggaacaacgggacgtccacatgcaaaaaaaaatctagacagacgttacacttcccaaaaattaaatcaaaatggatcataaagctaaatataaaatgcaaaactagataatttcttgatggtaacatagaagaaaatctagatgaccttaggtatggtgattgcttttatttatttatttactttttttgagacggagtctcactcttgtcgcaacagtctggagtgcagtgccgcaatccaggctcactgcaacctccgcctcccgggttcaagcgattcttcctgccttagcctcctgagtagctggcattacaggtgcccacgactacaccagactaatttttttgtatttctagaagagacagagtttcaccatgttggccaggctggtctcaaactcctgacctcaggtgatccacccatcttgtcctccccaagtgctggaattacaggcataagccactgcgcccagccagattacttttagatacagcatcaaaagcatgatccatgaaagaaataattgataggccagacttcattaaaattaaaaactgctttgcaaaagatactgtcaagagaatgaaaagtcacaaacaaggaaaaaatatttgcaaaagacacatttgataaaggactgttaacaaaaatatataaagaactcttaaaactcaagaataggaaaacactttcccactcaagaaggtgtggcaggtgcctggcacggtggttcatgcctgtaatcccagcacttcgggaggccgaggcaggaggatcacgaggtcaggagatcaagaccatcctggctaacacagtgaaaccccatctctactaaaaatacaaaaaattagccgggcgtggtggcagccgcctgtagtcccagctactcgggaggctgaggcaggaaaatggcgtgaaaccgggagacggagcttgcagtgagccaagatcgcaccactgcactctagcctgggcaacagagcaagactccgtctcaaaaaaaaaaaaaaaaaaaaaaaaaaaaagaagctgtggcaggaaaaaaaaaaacaattaaattaaaattttaaaatgggcaagaagctctgtggcatgcccctatagtcccagatacttgggagactgaggcaggaggaccacatctgtgaatacccactacactcaagcctgagcaatgtagcaagacccagtttcttaaaaaaataaaaaggaaaaagaaaaagacacaaactgacatctcatcaaagaagatatacagatagcaaataagcatctgaaaagattttcatcatatgtcattagaaagttgcaaattaaaataagatacctgactgggcgcggtggttcacgcctgtaatcccagcactttgggaggccgaggtgggcagatcacgtgggtcaggagttccagaccagcctgtccaacacagtgaaacccacctctactaaaaatacaaaaaattagccgggcatggtggcaggcgcctgtaatcccagctactcaggaggctgaggcagagaactgcttgaacccgggaggcggaggttgcagtgagccaagatcacaccactgcgctccagcctgggcaaaagagcaagactctgtctcaaaacaaaaacaaaaaacagccaggcgcgatggctcatgcctgtaatcccagcactttgggaggccgaggcaggtggatcacctgaggttaggagttcaagaccagcctggccaacatggtgaaaccccatctctaaataccaaaaattagctaggcgtagtggcaggtgcctgtaatctcaagaactcaggaggcagagacaggagaatcgcttgaacccaggaagcggaggttgcagcaagccgagatcgcgccattgcactccagcctgggcaacaagagtgaaactctgtctcaaaaaaaaaaggaaagaaaaagaaaatgagagaccattatacgcctaccagaatgaccaaacaccagaatgctgacaccaccaaatgctagtaaggacatagaataacaggaaatctcattcactgctggtaggaatgcaaaatgttacagctactctggaagacagtttggcagttccttacaaaactaaacgtaactctcaccatatgaccagcaatcatgctcctaagtatttacccaaatgaattgaaaacctacacacaaatgtttagagcaactttattcataattgccaaaaccgtgaagtaacccagatgtccttcagtagatgaatggataaataaactgtggtatatccagatgacagaatactactgagtattaaaaagaagtgagttatcaagccatgaaaagacacagggaggctgggcacaggggctcacccctgtaattccaacaccttgggaggccaaggcaggcagatgacaaggtcaggagttcgagaccagcctggtcaatatggtgaaaccctgtctctactaaaaatacaaaaaattagccaggcggggtggcacatgcctgtaattccagctacttgggaggctgaggaaggagaattgcctgaacccggaaggcggaggttgcagtgagccaagatcgcaccattgcactccagcctcggcgacagagcgagactctgtctcgggaaaaaaaaaaaaaagaagaagaaaagacaagacaagacccagggaaactcagtgcatattatcaagtgaaaaaagccaaactgaaaagacttacatactgtgtgattccaattctatgacattctggaaaaggaaaacctatggagactgtaaaaagaccagtgattggctgggcttaggagggaaagagggataaacagacattaagtagaggatttctagggcagtgaaactattctgtatgacactacagatggtctccaacttatgatggttcaacttatgatttttcgactatacaatggtacaaaggtgatatgtattcggaagaaaccatacttcaagtaaacatacaaccattttatttttcattttcagtaatcaataaattacatgaaatatttaacactttattataaaaacagactttctgttagattactttgcccaactgtaagctaatgtgtaagtgttctggcaaattaaaggtaggctaggctaagatatgctgttcagtagattcaatgtattaaatgcatttcaatttatgatggtttatcagggcataaccctgttgaagtaagctcatcatgtaaagcagcatcaatacaatggtggatacatgtcattatacggtggccaaaaaccacagaatgtacaacagcaagaataggatgtagtgtgttatggactctgagtgataatatgtcaatgtaggttcctcagttgtaacaaatgtcccattctggtgggggaagttgagaaaggggaaggcagtgcctgtgtgcaggcagggggttatatgggaactctctgtactatctgctcaattttgctgtgaacctaaaactgctctaaaactgggcacagtggcacacacttgtaatcccagctactaaggtggctgaggcaggagggaccacttgagcccaggagttcaagaccagcctgggtaacacagtgaaatcccccatttctaaacaaacaaatacaagttgctctaaaaaatatagtgtattagtttaaaaaggaagaaagaaaaagaaagccagcaagccagccacccaaggaacaaaactttccagtaaaaacaaagtgtaaataaaattgtatcttgaaaaatgaaattgaaaattgtttctgttcttatatgtaacataatttaggttataatacaactacatatttatgtttaatttgaaaagcaaacgtttaaaatgaaaagtagggagtttgggcacaatttttccaaaaaaattatgatggcaccataagacacaattaacttcctatgtgagttttactgcattaattttacagtatctgaggacttggccagtcttttcatgggactctctccatcttttgatatgattctattttgcagggcccaaggtagcatcctcctcaatggttttcttttcactgttagtgggtctgtggaacgtaatgtcaaaagatgtgtgtgaaacttagtctccaacatttcattcattgaacttcatgaaatcttgtatccttcacaagattttaaacttcatttcacaactgctgtgaccttatcaatcagcaatgaaaataacaaactctaagctgggtgtggtggtttacgcctgtaatccctgctctttgggcggaggcaggcggatcacctgagcccaggagttctataccagcctgggcaccatggtaaaaccccgtggctaccaaaaaatacaaaaattagccaggtagccaggcgtggtggctcatgcctgtaatcccagcactatgggaggccaaagcaggcggatcatgaggtcaggagttcaagaccagcctggccaacatgtgaaaccttgtatctactaaagataccaaaaaaaaaaaatttagctggacatggcatgtgactgtaatcccagctactcgggaggccgaggcaggagaatcgcttgaacctgggaggcagaggttgcagtgagccgagatcgcgccattgtgctcccgcctgggcaacagagcaagactgtcttaaaaaaaaaaaaagaaagaaagaaagaaaatgctaataacatactattgatttgataggcagggacagaagttagtattaagttgtgatgtctggaaatgaacaaattttctaagtggtcagctcattaacaacaactctcatgttaggacaatttttatttttccctataccactcatagttgaagagactcagacaaggatctccgttcatcacacagcaaagaggccaacttaagctaaaaatgacaatttctacacttatccagttccggtgtgccaggcactatcctagtgctggagatacaaagatgaacgtgaaatgccctctaggaattcaatctaacaagagaatggaatgaataaacacacacacaaacgtgttaagggttgtgataacaaggcctgcatgtacaaagtgctaaggatgagacacagaggggaaagaaattcagtatgtctggttctctctgagttaagccttgaaagaggaattttaaaggaaacacaccaagggaaaggctgccaagcagagggtaggggcaaagaaaggcctggaaactgaaaacacaaagctcattcagaaaatgcaggctccagtgtaactagctcaatgttagttgctgtggttctggagaaggagtgattttaaaacagtaataacaaaaagaaccagtctaaaaagttaggccgggcagggtgcagtggctaacgcctgtaatcccagcactttgggaggccaaggagggtggaacacctgaggtcaggagttcgagaccagcctggtcaatatggtgaaaccctatctctaccaaaaatacaaaaattagccggatgtggtggtgcatctgtagtcccagctactcgggaggctgaggcacaagaatcgctcgaacccaggaggcagaagttgcagctagccgagatcacaccagcctgggtgacagagcaagactccatctcaaaaaataaatttaaaaataaaaaataaaaaggtaggccaaggctcaagtttagaccatgcaaacaagtttggattttattttccaatatttgagaaatccatagcaacaagatacagaatggattagaaggaacacacaaaatgcaagaagatcctaaggcacctcctgttctagtgtctaagcaaggacagcaaagggaccagacagaaggtggggatacaaaagtagctcatcaggtttgagttacaactgtgtgcagaggagggatttctgggggaatgcagagttagaaatgatcctggggctctggccaggctgctgctacaaacgcagagcgaaagcagaagcacattcctgggtggggaggagccaaagggttaaatttggaataggaatgcactgagttgaggtggtgaagtctcatcaactactgcagatgcactggcactcagtgaaacacggagctccagaaacggatcggggccaggtatggtggctcaggtctaaaatcctggcactttgggaggctgaagcggaaggactgcttgagctcaggagttcaagaccagcctgggcaacatggcgaaaccccatctctacaaaaatacaaaaattagccagtaatggtggtgcgtgcctgtagtcccagctacttgagaggctgaggtgggaggatcaccagagcctgggaagtcgaggctacagtgagctgtgatcacaccactgcactccagcctgcgcgacagagtgaaaccctgtctccaaaaaaaaaccaaaaaccagaatcagattgggaaatgtcagtaaaatttgatagctggagccataataactgcaactgcctatggagaatcactgaatttcaaccagacgaattcctctccttctccgcacctccaaatgcccttgtgtcttttttaaaagctagacatcacccactttcccatgtcctaaatcacctttttttctccttattaaacttattccataactacgttctctttcagaacacaggactgagagagtgtactcttgcaacattatgtaaaaaggtcatccaatccaaaaggaaagctgtgttttccaagactgctaactcctggagaaaagaaacaagacatcctcaatgctttcctaataactggtttgagcaaaatgcaaaagtttaactgctgagtgactctccctggagaaagccatgaaaatatcttaaggctggatctagggtgtccaaacattttcacaggccgcaggctagagcactggtgcaggagaaggggacaccagagacctggcagttcaggctttgaaggcagtaaacagccactgacctcaggcaagtcacttctcctttaggttttccatttcacagactgatgagtacatggcctaaaatgatcgcccttctagttgagaattttcaggcctaactaaaagtagattaaagtaaaccttggagagagctgaattttttttaagtgccattaagcaattcagggattatctaaacagcctcggttttcttttctctgcttccttaccaactgcctattaactctcactcttagctcataagcagtcagaggggctgaagcacaaagaggaagtgaagctcaaagagttaattttgctgcattagcggctctggtgaaagacagtgggcacagaaaaggaatcaaatgaccaaaactggacttggggattactggtggcagccagccagcaaatttctagatactgcacacaacctgtcagccaattaaaagaaaattggcagaaaatgacggaacacgttctttgtttttgtttttttgagacagtctctctctgtcaaaggctggagtgcagtggcgtgatctcggctcactgcaaccgccgcctcccaggttcaagcgattctcctgcctcagcctcccaagtagctgggactacaggtgtgcgccaccatgcccagctaatttttgtatttttagtagatatggggtttcaccatgttggccaggctggtctcgatctcccgacctcgtgacccgcccaccttggcctcccaaagtgctgggattacaggcgtgagccactgcgcccggcccgggaacacatctttaaaggtctcaatagaaggatgcacacactacgttgaatggttatgtcttcggagcagagtggtgaaagaaggtcagacttctgttaagtctgaatacctacacgcgtacttctgtaattcaaatttaagattaaatattttcaagtttaaaaaaaggaaaaaatggccgagcgcggtggctcatgcctgtaatcccaacattttgggaggtcgaagcgggtggatcacctgaggtcgggagttcaagatcagcctaacgaacatggagaaaccttgtctctactaaaaatacaaaattagccgggcgtggtggcgtgtgtctgtaatcccagctactcgggaggctgaggcaaggagaatcgcttgaacacgggaggccgtggttgcagtgagccgaggtcgcgccactgcactccagcctggggaccaagagcgaaactccgtctcaaaaaaaaaaaaaaaaggaaaaaacatttctaccttactcttattttaggagccacgcctcccacctttgtctagtaacacagctatagtgatgtctcttaggggatgagaaaatgctactcctccactaacaatgactcttggagagggaacaagacatcaaatcgcgaactcgaaaaactaacagaaaaaagttaaaaagtggtttgtgtttttaaagccagccacaacaccttcattcaaggccctaaaccgcagagactttctagacctatcttaagcgtcagtaccacacgcacttcgtgatggaacggtattgttctcctagaacagacccgttttctcatgaaaccgacgtttttacaaaagcctgtttgtggacggcctgcggcggccgcgaacccgcttcccttggattacccagggctgggagaaggagggctttcgccggctgcggtccccggtccccggcctccgccccggccccggctcccccggcccccgacccccccggcccacgccccctgcccggaccccgccccggccccgccccgcgtcacctgactgtcccgcggcccccagacccggcgccaccgacctgatgacactgatgtggaactcgtcctcgcggaggccccgccaggcgccgggcaggaactccttgcaccacagataggccctgcgccgcgtccggggctccggctgctcgtctgcgggcggctgcggcggcgggggctggggcagcggcagcggcagcggcagcggcggcggagggggcagcgcgagcggcggctgttggccgcccagctgcttggactcgaggtcgctggcggcgtcgcgctgctgccccacgccgggcgccggggccgcgctgccgctaccgcagctcagcagcagcccgagcggcgagggctccgcctcgcccccggtgcagaatttggttttcatgcccgacaggcggccgaggaggcgcgggcggccgcagcgcgagaggactaggctcagagtccggccgggcgccccctcgccgctctctcactggcaggccggcggggcagggggccgcggcggttgggcgcgcggggcggcggcggcggctgcggcgactgcggcgactgtggagcggggatgtgctgctggccgctgcactcgctcctctgccgccgccgcacgaggagcgccggccgcgtcacagcccgccctcgcgctcgccactgattggccgccgtccgccggcccggcgcatcataaccgccgccgccctcgccacaccgcctccccattggctgcggcgccgcccccaacccagagcgctgcggcctccgtgagcggggcctgggcgaagggggcggggcgtcgagggggcgccccggcggtcgcagggaagggggagaggggagcgaggcgcggggggcgccgggagagcgcctccgcggtgggacggagccggactgggccgagcgagggaggctcctgagcctcggaggaccccggggttggctttgggagctgaaagtttccttggacccctcggaagccccgtgacatcagaggccgggcctggcaggggcaggcaggaaacgtgtctggaggctactgccctctccgcgtgaccttgggcgagcagcctcctcctggggctcagtgggtgtgattttgtaacatttcccagcgctgccacaggcgcgtctcgccctgtccaacgcggagcccgaagaattactaagaaaccgaggtctgaaggagggaagaggtgacgggctcgaggccacacggtgggccaggctgggcccggctgcacgccggctaccggggcccagccctctgcacgcctcccgcagcctcagtttccctgtccgtggtactgaggatgctcgggcctagaagttcagggctggaggcccagggaccgtcgagggaggggcatcatccccgccatggggccgccgcaactgcccagagcacaggccaaaggtgcgtgccacggggctactggcgttgtggacgctgcccctgcctccccatcccccgcaggaaacagccttgtgaccgtgactaacgcacctttgccggggtagaggggcaagggcccctgctaccgtttgccacacactgccccatgtccctcactgctcccgtccttcctagaagtgaggtgctgatacatataaaaattatggatcccattttatgggacatgagctgaaacaggaggtttcctgggctgccaggggcttaggaaatccagtgcctgatacacaggaaatgcttctatgtggggagttcacagtcttccagaagcaaaaatgttttttggttttttttttgagacggagtcttgctcagtcgcccaggctggagtgcagtggcacgatctcggctcactgcaacctccgcctcccgggttcacgccattctgctgcctcagcctcccgagtagctaggactacagacgcccgccacgacgcctggctaattttttttttttttttttttttttttttgtatttttagtagagacggggtttcatcgtgttagccaggatggtctcgatctcctgacctcgtgatccgcccgcctcggcctcccaaagtgctgggattacaggagtgagccaccgcgcccggccgcaaaaatcttttagagtgtgtacttggctgaacttgctccacgcaaaatggtcttatttaaggataaaaatgaaaggggacttttgtaaggctgctgtggcgacaggcctggaagttgacctgcagggaggtaggagagaccaaggcccctgggacggaggccggccactggatgtttgaaaggctgagaagccaagggcttcaatctggggaggccgtttggataaaggagccaaggactttctctaaaaataccggctcacagggaggtggggccatgccaatggcctgcccaggtgacaagccctttgtcccactgtcccctggcaccagtctggtaatctcaaaggaatgccagaaatctggccaggaggaagggacactaaagtaaggagtggccctctataatttgaaataactctttctggcatctgctggcttttgttaggaaaagcctcagacatttttatgggatcacagttccctgtgggaggaagaggttgcctcaaggccaggcatggtggcttatggctgtaatcccagcactttgggaggccaaggcaggaggatcacttgagccaggagtttgagaccagcctggccaacataacaagactctgtctcgccgggcgaggtggctcatgcctgtaaccccagcactttgggaggccgaggtgggcggatcacaaggtcaggagttcgagaccattccggctaacacggtgaaaccccatctctactaaaaatacaaaaaaaattagccgggcgtaggtggtgcatgcctgtagtcccagctactcgggaggctgaggcaggagaatggcataaaacccaggaagcggaggttgcagtgagccgagatcgcgccactgcactacagactgggagacagagcgagactccgtctcaaaaaaaaaaaaagactgtctcaaaaattaaaaatgaaaaaaaaaattaacagagcattgtgtcttacacttgtccgactacttgggaggctcagccaggagcatcacttgagcctgggaggtcaaggcacccactgcactccagcctgagtgacagagtgagaccgtatttgctgaatgaatgaatcagtgagctcctggctcagcaattattaacttatgactttgggctgagcctcggtttcctcaactataaaatggggattataataccccgagcatccaggattgagagaatgtatgcaaaatgcatagcatgcaagaagtaaccgtttggttgcgtgcagtgcattgcatggcgttgcctctgccagtggttggttttcggagatgaataatgcatgcacttgtagcatttcacagcttgggaagacagtgtcgtataagaaaagaatttgggccgggtgtagtagcttatgcctgtaatcccagcactgtgggaggccaaggtgggaggtttgcttgaggccaggagttcaagatgagcctgggcaacaagtgagaccctgtctctacaaaaaataaaataattggccaggcacagtgacatgtgcctgtaatctcagttacttagaagccggaggtgggaggatcccttgaacccaggagttcaaggctgcagtgagccatgatcacgccactgctctccagcctgggcaacagaggctaggaaaataaaaatacattttaaacaaaaataattcaaacactctgataaccaaaatgtcaatgtctgtgcacaagtagacgagtttgagagaaacttgctatggcaggtaattggaggttgttccaattaccaaaccttttcctctaggataagataaaaaaattatccaaaagctctgtgattgatgctgaattctgagagcagactcagagggtgggtgatgggccttaggagggatagaggaaagattgggaagttcccgtccactctgaatttcctgctgatgggttcctcggggtccacccacgggcctcagccctgccaccaactccaaggcctgttctgagaaagggctttgtgagtctgactccccccaagatgggggaacccactgtcaagcacctggtaggagcaggctttgagccctttcaaagatgctgcatacagcaagttccctaagcagcagtgaggtgagtgtcattagcacttcatctcccaggtggcaagggagcttcccaggggataaaaccattcgttaaaggccagcaggacctgggactccacccaggaccccatccaggggagccttgtccttctgtccttctgcaccataagcacctttggcccaggaagcactagacatttggcacagtgggggttccctcacgggctggagaagcagagccctggcaaggctgtgctcacacctcctcccaggtcacacccaggaccaagcacccctgctccagttctgagccttaaaatattgatgagagcacagaggccacctggctgcaatcctccatgttgaagattgggttgcagtgccagctagcagagtgacatggagctgggctttccctgagtgctgagcgtggccccagcccagctctgtcagcgaaaggctgtgtaggtccagcagctttctggaggtctctgagcacaagtgtggtctgacttggactgacccttctaccatacatttggctcagcacccgcagccagagtctagggcccacagggctcagaggaagcaggtgactagaatatccatctgtctggtgggtggggcaggcattcctcctgtcctcatttgcagggattttgagtataatattatgggtaaaaattctggccaggtgcagtggctcacgcctgtaatcccaacactttgagaggccaaggtggatcacctgggtcaggagttcgagaccagcctggccaacacggtgaaaccccgtctctactaaaaatacaaaaattagccaggcatggtggcacatgtctatagttccagctactcgggaggctgaggaaggagaatcacttgaacctaggaggtggaggttgcagtgagccgagatcatgccactgcactccagtctgggcaataaaagcaagactccataacgcgcgcgcgcacacacacacacacacacacacacacacacacacacacaatctttagaggtcatgctgccacccactgtgtgaccttggacagaacatctacctttctaagccactttcctcatccccaaatggagtcctactctacagggctgttggggagattcaccgaaaccagcaaggaaagagctgggtgtagagccaaagccccacaaagggtatctatgcttttcagcttattgttagctggattcccagagcctggcagagagcagcaaatacccattcatcctaagtgccagtggaagcgcaaagcctgcaggagctctggcaggtctaacagggcctggagagttttccattctttgaagctcctggcacattcaaaaattaagaaaaatctaggcgggacacggtggctcacgcctgtaatcccagcactttgggaggctgaggtgggcagatcacctgaggtcaggagcaagactccatctctaaaaaaaaaaaaagaaacatctcgacagggttaccaaaactggggcatgtttgaaatacttaaattgaacaaatcagtgcttttaacacacatgcaaaagtcccattcaagataattttgcaattctcaaggtaatagagggattactttaaaataataatggagccaaccaagcatagtgacacctgcctgtggtccaagctactggggaagctgaggcaggaggatcacttgagcccaggggattgaggctgtagagacatgattgagccactgactccagcctgggtgacagagtgagatactgtcaataataataataataatggtttgtagagcaccttaagtggtatggtgtgacaaacatctttcaggcctgacaacagatctctgtactaatctgattatccttattcagatgtatctaaatctgaggcccttggggcacatgattgcctcctggggctgccatagtagaccctggcaatgacctagtgaccgttcctctactggagatgatcccctgggcccctcagaatgcatttcctgtgtccacatagccggtgttttaagtcaggtgatctttttttttttttttttttttttgagacgaggcctctctcgttgcccaggctggaatgcagtggtgcaatctcggctcactgaaacttcttcctcatgggttcaagtgactggcctgcctcagtctcccaagtagctgggattacaggtgtgcaccacaacgcccggctaattttggtatttttagtagagatggggttttgccatgttggccaggctagtctcgatatctgcccacctcagcttcccaaagtgctggaattacaggcatgagccaccgtcgccagtcttaagtcaggcaatctaagctccctttccaagtttgttgaaaacctgatttgaggttttgtgctttaagcttgcattacatttgtaacacaataaatgcaatttttggcacaataaatgcaaaattgtggcgcagtgactcatacgtgtaatcctagcactttgggaggccgaggcaggtggatcacctgaggtcaggagttcaagacaagcctggccaacagggcgaaaccctgtctctactaaaaatacaaaaattagctgggcatcgtggcaggtgtctataatcccagctatttaacaggctgaggcaggagaatcacttgaacctggagggcagaggttgcagtgagccaagattgcgccactttactccagcctgggcaaaagagccaaactctgtctccaaaaaacaaacaaacaaaatagaaaataaatacaatttttaaaaagaccccagtcatcatgcaggttacactgtggggataacacttctgggctaggagttgggcaacctgggttcaggcaccgcaccccctctgccggctgcacagggcccctctcccctcagtcagccctgggccctgcaggctggacttttgcctggtagctttgggctggccctcccttctgcaggggaccccttgtacagatgggtaagcagaggcacaggggcacaggcaggacagcggctctgctcacgcaggatgccatggccagtcgtgggcctactccatccttgatcctcccctcccaagggcacttgccatccaggcctgaatggcaagaggcccctaaggggcccccagtcctgtcggcaccccctttgagtgactgacagggaggcaggggagctggcagcccccatccccacaccagcttgtggaagctaccagcgatcggtggggccccactggcagcccgtccgtgtagccttggccgggcccccaagcttcttagaatgccatctaagaaggcagagggggatgagcggcggcggggaggaggggcaggccttgggaagatccactgggtcacagggaagcgaaggcggaccctcctcccccagcgctactgcccgggccgaattccaaggccagcggctgcccgctgagaaggaatccggaccaacgggattctggcttccctctggcccctcctggcgagagcggcgccgggaggagggggcctcagaaggggcgggcaggggcggggcccgcggggtaggcggagctcccaggaaaacagcgggcggggcctcgcgcgaggggcggggttggcggcgaggcgtcccaggacccccattcctccctccgccccggggcttctggggagcggcgcagcttgactgccaccgactgcgggcctccctgccctacaagcccccacccccgcccccccttgggacctggcgaggagttgccccgcaaagttggggctggtgcggggttaaggggattacaattttcctaggacttagtgtgctgaagctgcttttgcgattagaatttatatttacaatgctgataacaataaactacccaggctaccgcgccacgtggacgggggtggtggatggaaagggaaacccttggccaccagcagcctgtgataaggccaaggttccctggctggattgctgcctaggatgcctgtggtccctacccccgcccgggaggcaggattgactaatccgaccaagcaaggcctccaggctgggccaagaaccccttcccagtcctctcccaaagtctatgtccttgggctcacgctgtcctctcctgtccttgcctcctgcatctacagacccctgaggccccctcctccttcagagcatgcacgtcgcaaattctcaatgactgtttggaggaatgaataaatgaattgtgaacaaatggtctgaagattccagaggtagcctaatggggccctgctgcttgagttctaatcccagccccaccagttgttggctatttggccctgggcaggtgattattctctctttgcctctgtaccttgcccgtaaaatgaggagaataccagtacctactgcataaggttgttaaaggattaaatgagtgaatagttacaaagagcctggaacagagtgttcaaagaaacacacagccacagtattaaaaaaattaaaaacccatttctctccaggcttctgccatcactctgtgtgacttcaacattctacctgcatgacctatgcagcacctggccgctgttaccttgccaccctcactgacatcttctctgcataggccttccaccatgccctgtactttctccccactagaaatagccctggctctgaaatgtgttttaatcatcccactttgggtccaccagttcctagcctttgagcttaggcctctcctccaggaccctccctggctacgatttcccaacccctctcgaccttccattcactgaccttgccactttcttgcctcttgtctgcacctctccccatccctagtgtggattccatccccttgtgaacgctgccacccgtcctggcagagactcagtacttccactctctgaatgcatttcttcttcctaggcacaccagaagactacatttcctagccccccacccccttgcagtgtctgggaccatgtgactccttaattaggtcacttctctctcctgggaggccctctctgccctctctaagtctaactagtggcaaaggatctaagggaagaaacctggcagagttactagtcccaagaagcctgggtccctgaatcaccacatggaagtctacgcgcccaccacctgaatggactaaggtatgaacagaagtaatacacacccctttagggccaaggaggtgaaacagctggtatgccttcctcacactctcctctgctttcctggtgacctaggaagctgcaggatgaagacaacagcatcacaaggaggaagccaggatccctgtgttaccacaaggaggagagatgcctaaccaagaccgtctgcaaggattttgtgtgagccagaagcagagctgtatggtgttcagccactgagatttgagggctgtttgttacagcagttgacctatcctgactgacacatcacatcattcctttccccaccatgtgtctaacatgctaccaaattgaattttaagtaaattagtacttataaattaagtacaaatgcttttcaaattcacatgaatctttggtaaataaaactggttgtaaaattattgataaatatagaaatgtctgaaattattgataaaatagccttgtgcaagtaagactaatttaagatcattggttcaatgaaaataactgaatcttctgagttgtcggcaaaatgctcatgtgtttaagattcttagataggtgttcacttaatattcagactttaaaaatgattaaccaggatataactttgaccagcctagtatcatagtttttataagtaatcctgggccgggcacgatggctcatgcctgtaatcccagaactttggaaggccaaggtgggtggctcatgaggtcaggagatggagaccatcctggccaacatggtgaaactccatctctactaaaaaaacaaaaaattagccaggcgtggtggcacgtgcctgtagtcccagctactcgggaggctgaggcaggggaatcacttgaacctcggaggtggaggttacattgagccgagatcttgccactgcactccagcctgggtgacagagtgagactccatctcaaaaaaaaaaaaaaaaaaaaagaattgtggaatcctgctgggcatggtgactcatgcctgtaatcccacactttgggaggccaacgcaggtggatcacttgagatcaggaatttgagaccagcctggccaacatggtaaaacctcatctctacccaaagcacacaaaaaattagccaggcatggtggcagacacctgtaatcccagctactcgggaggctgaggcatgagaattgcttgaacctgggaggtggaagttgcagtgagccaagtttgcaccactgcactccagcctgggcaacacagcgagactccatgtcaaaaacaacaaacaaacgaacaaaaagaattgtggaatgctgctcatccataaaatgctaatatctaatgggcatttcaggatttcttgctttctagatttatataaaatgtgccaaagatgtgttcttattgagaaaaagaagaattttgtctaattcagaagttatctgcccagacgcagtggctcatgcctgtaaacccagcactttgggaggccaagttgggtggattacttcaggtcaggagttcaagaccagcctggccaacatggtgaaacacatctctactaaaaataccaaaaaaaaaaagttatctaaaagtcaattcaaattatggagttaaaagtggttcttggccagacgcagtggctcacacctgtaatcccagcactttgggaggccaaggcaggtggatcacctgaggtcaggagtttgagaccagcctgagcaacatggtgaaaccccatctctactaaaaatacaaaaattagctgggtgtggtggtgggcgcctgtaattccagctactcaggaggctgaggcaggagaatctcttgaactggggaggcagaggttgcagtgagctgagatcatgccattgcactccagcctgggcgacaagagtgaaactccatctcaaaaaaaaaaaaaaaaaaaggtccttaaacaaggttgaaagaaaccattaagtaggggagagagagatgtgaaaaaaattatggatacaaagatgtatttttggcaaagaagcttataaagaaaagacaatacctttatatgagaaaggatcttgtatggaaaattattgtcctagagtagaatgactggttatttaagaaagaggaaggccagatgtggtggctcacacctgtaatcccaaaactttgggaggctgaggcagggggatcatttgagctcaggagtttgagaccagcctggggaacatggtgaaacactgtctccccaaaaatataaaacttagctgggcatggcagcatgtgcctgtagtcccaggtactcgggaggctaaggtgggaagattgcttaagccgaggagattcaggctgcagtgagccaagattgtgccactgcatttcatcctgagcaacagaacaagaccctgtctttaaaaaaggaaagaaagaaggaaggaaagaaggaaggaaggaaggagagagagggagagagagaggaaggaaggaaggaaggagggagggagggagggatggagggagggagggagagagagagaaggaaggaaggaaaggaaggaaggaagacagagagaagctgggtgtggtggctcatgcctgtaatcccagcactttgggaggctgaggcgggtggatcacctgaggtcgggagttcgagaccagcctgaccaacatggagaaaccccgtctctactaaaaattcaaaattagctgggcatggtggcacagacctgtaatcccagctactagagaggctgaggcaggagaattgcttgaacctgggaggcggaggttgtggtgagctgagatcacaccattgcactccatcctgggcaacaagagcaaaactccatctcaaaaaaaaaaaaagaaagagaaaatgaagaaagagagaaatagtctaggacaagtcagaaagtccaagcaggacatagatggtttgtgtaagttgtgataagatttgtaaaggggaggccgggcgcggtggctcaggcctgtaatcccagcactttgggaggccgaggcgggcggatcacgaggtcaggagatggagaccatcccggctaaaacggtgaaaccctgtctctactaaaaatacaaaaaattagccgggcgtagtggcgggcgcctgtagtcccagctacttgggaggctgaggcaggagaatggcgtgaacccgggaggcggagcttgcagtgagccgagatcccgccactgcactccagcctgggcgacagagcgagactccgtctcaaaaaaaaaaaaaaaaaaaaaaagatttgtaaaggggaatttacaaaaacaggaattttgtttgtgattaagttagctgcgattaaaaggagattatttctcctttctaaggaatggtcccctatgttaaaagaaggtctgcttaaggtattgatttgctcttaatgaaattataagaaattttgcttttcaattttttgtttgttagttttgagatggagtctcgctctgtcgcccagactggagtgcggtggcgtgatctcagctcaccgcaagctccacctcccagggtcactccagcctgggcaacagagcgagactctgtctaaaaaaaaaaaaaaaaagggatgaatgagtgcctgtccacctccatttcatctggcctagcatatttaactgtctacacgtcttttgattctaagtctcttggccacagcggtcccacttagggacataatatagccagggcaggtagcacaccaccctggcatcgatatggggcacaataaaagcttggccatgatactgcctctggcataccatgaccagaaaaaaaaaaaaaaaaaaaaaaaaaaacacatgcacctgaaaatctagttgaggccatgacaggaagtgggtagggggagggagagtcagccaggcctcactatatttcctcgccttggaattccacacatattttccctgatggtaccaccaattataattcttcttgtcccccttggagggccttagtccctctacaaacaacagtgtctttctcaattcccataactgctccccataatactggtatcacattaaattactactttccccccatcccattcatgcttaaaccaaagcaccccttgaataacacaggtacttaacctttttttttttttttgagacacagtcttgctctgtctcccaggctggagtacagtggcgtgatcctcagcctcccaagtagctgggattacaggcatgtgccaccacacctggctaattttgtatttttagtagagacagggttttgccatgttggccaggctggtctcaaaactcctgacctccagtgatccgcctgccttggcctcccaaagtgctgggattacaggcgtgagccactgcgcccagcggtacttaaccttaacagctcccatcccattccagtctgtgacccacagtggatatctgtggctatatggatgcccactaaatcaatcagcctataaacaactcattcctcatttgagaccacgggtaccaatgtgttgataacatttggctcaaaggtcaacatatagtaagacaggtgaagccggccgggcgcggtggctcacgcctgtaatcccagcactttgagaggcctaggcgggcggatcacgaggtcaggagatcaagaccatcctggctaacatggtgaaaccctgtctctactaaaaatacaaaaatagagtcgggcgtggtggcaggcgcctgtagtcccagctactcgggaggttgagacaggagaatggcgtgaacccaggaggcggagcttgcagtgagccgagatcgtgccactgcactccagcctgggcgacacagcaagactctgtctcaaaacaaaaacaaaaacaaaaacaaaacaaaacaaaaaaaagacaggcgaagccttctaatatacaattatacaacatcacttgcccaagcactaagtgagcaattggccttctgttgtctggggtcagggctgctgtgggcttgttggccccatggggaggatttgcctaacatgaggcaactcttcaaaactttacttttcactctacataccttcttataaaatgggagatactttagataaattgagactctctcgattctatagcagatatagttatggataatagattggcattagactatttgttggctgaacaatgacaggtatatgctgtgattaataaaacctgctgtacctatgtaaacaactcaggtcaagtagaggaagataccgacaaaatatatgaacaaggctgggcacagtggctcacgtccagtgcttttggaggccaaggagggtgaatcacttgaggtcaggagttggagaccagcctggccaacatggtgaaaccccatctctaggaaaaatacaaaaattagccaggcatggaggcacatgtctgtaatcccagctactccggaggctgagggaggagaattgtgtgaacctgggaggcagaggctgcagtaggccaagattatgccactgcattccagcctgggagacagagtgggaccctgtctccaaaaaaaaaaagaaaaagaaaaaaaaaaaagggccaggcatgttggctcacgcctgtaatcccagcactttgggaggctgaggcgggtggatcacaaggtcaagagatcgaaatcatcctggccaacatggtgaaaccctgcctctactaaaaatacaaaaattagctgggtgtggtggtgcacacctgtagtctcagctactcaggaggctgaggcaggagaatcgcttgaagccaggaggtagaggttgcagtgagccaagattgcgccattgtactccagcctggcaacagagcaagactgcgtctcaaaaaaaaaaaaaaaaaaaaaaaaaaaaaagaacaagccaagtggctacatggtgttcacaaccccaatacccagactactatgcggaattccataaggggtttctaccggcagtgacttggtttttacctaggacctttaatagctctcttgttactattgatctttgtttggcctttacttatttaacctcttagtaaagttcgtgtcttctagattataacaattccatgtggaaatgatgcttgcactaggtttctgacccatcctgtcttctagcctggaaaataaagatctcctgcctttggggtccttagatcaggcaaccagagattttcactcctccaacaccaggcagagcctatgcccataagatcagcaggaagcagttgtagagggtggacctctgcccttctaccactttttaagattaaggaggagtctgacgcctgtcatcccagcactttgggaggccgaagcaggcggatcacctgaggtcaggagttggagagtagcctggccaacatggtgaagccccgtctctactcaaagtacaaaaaattatccatgcagtagtggcgtgcgcctttaatcccagctactcaggaggctgaggcagaggttgcagtgagccaacatggtgccactgcactccagcctgggtgagagagcaagactctgtccaaaaaaaaaaaaaaaaggtctggtgcgatggctcacgcctgtaatcccagcactttgggaggccgagacgggtggatcacgaggtcaggagatacagaccatcctggctaacacggtaaaaccccatctctactaaaaatacaaaaaaaattagccaggcatggtggtgggcgcctgtagtcccagctacttgggaggctgaggcaggacaaaggcatgaacctgggaggcggagcttgcagtgagctgagatcacgccactgcactccagcctgggcgacagagcgagactcgggctcaaaacaaaacaaaacaaaacaaagattgaagaggactctacagtctctccgggaaggaataaggttagagatcagcaggacttgttttctgagcaccagtcacaagaccttgctgaacaaaacatgatctgatcaaaagaggatgcaggaaagacattggccaaaactagctaaaaccaacacggtgaccaaagcaacctctagatgccctcattgttcattgtgcactaattataatgccttcgcatgctgaaagacactcccgccagcaccgtgacagtttacaaatactgtggccactcccagaagctaccttatacagtttaaaaagggtagaggcccagtgtggtgtttcacgcctgtaatcccagcactttgggaggcgggtggatcacgaggtcaggagatcgagaccatcctggctaacgtggtgaaaccccgtctctacgaaaaatacaaaaattagccgggcgtggtggcaggcacctgtagtcccagttacttaggaggctgaggcaggagaatcgcttgaacccgggaggcggaggtttccgtgagccgagatggcgccactgcactccagcctgggagacagagcaagactctgtctcaaattaaaaaaaaaaaaaaaaaagccaggctggctcacgcctgtaatcccagcactttgggaggccgaggtgggacagatcacctgaggtcaccctgaccaacatggtgaaactccgtctctactaaaatacaaaattagccaggcttggtggctcatcgcctgtgatcccagctactcgggaggctgaggcaggagaatcacttgaacccgggaggcggaggtttccatgagccaagatcatgccactgtactccagcctgggcaacaagagcgaaactccatctcaaaagaaagaaagaaagaatgaatgaatgaataaataaataaaataaaaattaaaaaaaggtagaaacccttgcttccagaaactccccactccttttgcagaaaactcgtgaatagcctgtcctttatttagcatataatgaaggaatagacataaatatagctggccagcaatccacgagggctgccgctactgctctacggagcagccattttcctgcactgttgctctaataaacttgtgtttgctttgctctgtcttgtttgctcacccttgaattcttttctctgcaaagccaagagctctcccagtctgagccccaatcatcaaagatgattttgagggcttcagtatttaaaggggaaaagcaggctggaggggaaggagggaggggatggtcacattattaaatccgtatgttggaagagaaaaggagcagggaggggaatagtgacatattcatctagtgcttctacatcggcattttacacaagataaggtgaatgcagagtgtagatatttaaccttttatccgtggctctctgcttaggaacaaaaggagaagcagcttcttgcctgactcagctttcagcttaatttttttcttttggcagagtgaattgggattccaagattttatttgcctttcccatcatgcgattggataccacaaagcagtgaagaacagtgagtgcccatgtacttgacaatgaaggggaatcttccagacatacatgaagcgaaggaaggcaggcaaaagagtgtgcttgtgtgatactgcctatttggggctctagaagaggcaaaactaatctatgggagtttgaggataatgttcaggataatggtttacttttggcaagtgttgtctgagaagaggcacttgggagccttctgggggctggaaatgttctgtatcttgagctaggtggtgggtacacaggcatatggcttgtcaaaaataattgagttagccgggcacagtagctcatgcctgtaatcctagcattttgggaggccaaggtgggtggatcacctgaggtcaggagtttaagaccagcctggccaacatggtgaaacccctgtctctactaaaaaaaatacataagattagctgagcatggtggtgggcacccgtaatcccagctactcgggagtctgaggcaggagaatcgcttgaacacgggaggcagagtttgcagagagccaagatcacgcaactgcactctagcctggaggacagagcaagattccatcttaaaaaaaaaaaaaaagaaggccaggagtggtggctcacacctgtaatcccagcactttgggaggccaaggtaggtggatcaccagaggttgggagttagagaccagcctgaccaacatggagaaaccctgtctctactaaaaatacaaaattagccgggcatggtggcacatgcctgtaatcccagctactcgggaggctgaggtaggagaatcgcttgaacccgggaggcagagtttgcggtgagccaagatcgcgcaattgcactccagcctgggtgacgagcgaaactccatctcaaaagaaaaaaaaaaagaaataaagacataaaagatacttggggctgggcacggtggctcatggctttaattccagcactttgggaagctgaggtggctagatcacttgaggtcaggagttcaagaccagcctggccagcatggtgaaaccctactaaaagtataaaaattagccaggaatgatggcaggcgctaatcccagctactcaggaggctgaggcaggagaatcgcttgaacctgggaagtgaaggttgcagtgaactatgattgcgccactgcactccagcctaagcgacaagagcgaaactctgtctcaaaaaaaaaaaaaaaaaaagttgagtcatgttgtgaatgtatttaacaccactgagccgtacacttaaaaatggtgaagatgttagattttatgttatatctattttaccaccatacaaaaaaattgagttataccttaaggtttgtggactttattacatgtcagttgcacttcaactgaaacatttagcacgatcgttgcccctggctcctgagtaatttttttcatttttcagacatgaggtctcgctctgtcgcccaggctggagtgcagtggcacaatcatagctcactgcagcctcgaactcctgggctcaagtgatattcccacatcagcctcccaagtagctgggatgtcaggcataataagctactgcgcccgtccccccaagtcattgcaaatgttctttgaaaataccaccttcaggccaggcgcagttgctcacgcctttaatcccagcactttgggaggccaaggcaggcagataacttgaggtcaggagttcaagaccagcctggccaacacggtgaaatcctgtctctactaaaaatacaaaaatgggctgggcatggtggtgcatgcctgtagtcccagctattcaggaggctgaagcaggagaattgcttgaacccgggaggtggaggttgcagtgagccgagattgcacccgcagcctggatgacaaagcaagactccatctgaaaaaaaaaaaaaaaaaagaaaataccaccttcagtggccacatattttcccatccacggatgtgtcctggtaccttcattcactctcaaatctttccccagaattgtgagaaccacagccccatgtcacagccccaaggttgcagacaaggtcccgacccacgttaagacgcaaaataatttattggaaggtttttcttagacccctgggaaggctaggaaacctggcttggaaagaaggaggagctcaaggaggcaggaagctgccccacagcctgggttaccccaggaataggctggtctaggggccgctgtaaccactgctgacactgtggatgtcaccatcagggacagtgccactctgggacgctgcagccatagccactgggaagaggtcccagtgggcccggattctttgtggaggaatctataggcctgagctctagaggctgggaaatggaggggcaagtctctggtccccatgctcaacaagaccccctcagtggggaattcctcattgcagaaggggcaccagatgcagggcagctaaacaagcagccagggattcctaccccgagaaatgtcctctaagacaataacagccagtatttgttgagctctcactgggtgccaggcccctgtgccaaacttcctacatggattatcacaaagaatactcacattagccctgtggggtgggggttattattatcttgattttgcagacaaggaggcaggcacagagcaatttggcaacctgcccaggaccacacgcatgaggagcaggaggcggcattgcattgggggcacctgtgtgccaggtcagtgcagggcactttgcagtcctcttagggctgagggccttggacactcagcaccattttccctgctctgtggctgcagggggctgcaggggctggaagcctgacagccacgtttccttgaagcccctgcagcagggttctgggttacagcctgtcagtcacgggcatttgcctgacacctggaaggctgtggggaggtgcagtggcaggcaggggtgggctttgccagatgtgacactttgccagtgacttctgggggtctcctggggctgaccagcccccctccgagtggtgcatgctcctgcaattcctccagtcctagtttcttttctttctttttcttaagacagggtctctttctgtcacccaggctggagtgcagtggtgcaatcatggctcattgcagccttgacctcccaggctcaagcagtcctcctgccccagcctcttgagtagctgggaccacaggcgtgcaccaccatgccaggctacaaatcctaacttctggaccaggtgtggctgcccctcagctctttggaaggttttgcaagcctcaaattccccgtgttcagtcctttcctgcttgaaatgccattttcccaactgaaccttgatgaggcagaggtgttaaggcaaagcagctgggcctataggcctgagctctagaggctggggaatggaggaacaaggctctggtccccgcgctcaacaagaccccctcaatggggaattccacattgcagaagggacaccaggtgtggggcagctcaacaagcagccagggcctcctaccccaagaaatgtccttctaggataatagccagcatttgccaagcactcaccggtgccaagcccctgtgccaagcactcaccgggtgccaggccccaggaggctgaggcaggactggctttagaacaggaaagctgggggtgcgagcccggctctgccagttctgtgggtttgtggttttttggtcgcttcatgtgcctgagtctcattttcctgtttcctcatttggaacaggcagtggtggcgtctctcatggggacgtggagataaaccagggcgacatcggggacacacaagcccagtgcctgcggcgatggccgatgaggcgctctttccatttcctggtagcagatgaggaaagtgaggctcaaagaggtgatgtcatttgccccaaatcacacagttgggaggtggtggggtgcgaattcaaacccaggagtgtgaagcttccagctcgtctgtttctccctggctgtgggtcagtgccctgtgggaggccaggatgccggtcagggactggcatggcagggtgaggggagcagggtgggccagcctgcctcccctccctctcctggggctgctgccctgtggagtaggggactgccatggccctcacctgtccaccttgtctccttgcctgggccttgtcagccctgtgcactccacagggcagggacagggcctgctgttgacagaagttcagaacaaggcagtgcttggccctgggtcctgcgcagatcagtgctggggctggcctggggcccgagctcaagcctccgaatccccttgcccaggctggactcttgctgcaccggggcaggttggcagaggcctggaggttttctctgggctgcaggttgaggcacctgggcttgcagacgcacgtctggcggtccagcttcctccctggcagcctctctcctgcgacagcaatatggtggtctgcagcttcaggccagctccattgctgcccatgaggctaccccagtggagagaggtcaccttgcctcagggtcccagctgaagtccccaggctgcatctcattggccaggcttggtgatatgttcatccctgaccagtcgcagtgcccggggggtgcgccctctcataggccagccatggagtaggctggggtcagaaaaggcctctcctccctgagccacatgaactgagaatggggaggtgacctttccaaagagggggtaatggactctaggagtcagaagtagtgaatgacccggacggggaaacgcaggccccactgtcgccagccctgctgatggtggccatcctttcttcctcaccttggcagcaggagctggatggagtctggggaggtggcaggtacaggctggagctcagagtgtgagagacagttgaggatggaatgttctcttggagaagcgagaataatgtctcctccccttctccaaacagcaagtgcccggcccagcctctgtctcaggaaactctctaacagccaagatcagggccttatggagagctgacccaaggccaggcactatgttggacacatctgatgagtcacttcacttcagccttgccaaagcttcatgagcacccatttcacagatgaagaaacggaggctcagaaagacaaacgtttcagccaataagtggctgaatctatgctcaaacctaggtctgtgtgatcccagaccctgaattctacaagtccaccaaaaactcctctttatcttcttttattttttatgtatttatttatttttagacagagtctcactctgtcgctcaggctggagtgcagtggcgcgatctcggctcctctccgccccatgggttcaagtgattctcttgcctcagcctccctagtagctgggactaaagacgcacgccaccacaccccgctaatttttgtatttttagtagagacggggtttcaccatgttggccaggaggtctcactctcctgacctcgtgatccacccacctcggcctctcaaagtgttgggaatacaggcgtgagccaccgcaccagcctatcttcttttaaaaacatcatcagtccaccctgggtaatatggcaaaatcccatctctacagaaaatacaaaaattacccaggcatggtggcacatgcctgtggtcccagcttcttgggaagctgaggtgggacgatcacctgagccctggaggttgaggctccaatgagccatggtcatgccactgcaccccagcctaggcaacagaatgagaccctgactcacgatacataaataactaaaaatagccaggcgggctgggcgcggtggctcatgcctgtaatcccagcactctgggaggccgaggcaggcagatcacgaggtcaggagatcgagaccaccctggctaacacggtgaaaccccgtctctactaaaaatacaaaaaaattagccaggcgtggtgacgggcgcctgtagtcccagccatttgggaggctgaggcaggagaatggcgtgaacccgggaggcagagcttgcagtgagccaagattgtaccactgcactccagcctgggcgacagagaaagactccgtctcaaaaaaaaaaaaaataaaataaaataaaataaaataaaaacacataaaacatcatcagtgtcttgttaaagtagtgctgttctagttgtaaacgagttagtgtgaggttgtgggccatgtctgaggcctcagctctcagcccaggaaataaggctgttgtgagtgagtaaggtgggggtgaaggatgtgggaggggggctctacttccaaagttgctgaggcagtgttgaaggccgcaggacacttcctcaccactgtggcccaactcttctttctccctcaaaacccagctcgaaggacacttcctcccagaagtcttctctgctgtgcctataaccctcccctgaccccaggaagacacacacacacacacacacacacacacaacttctctgtgtactccatcccctacgttgtactcatcaaagccccaaccatagtgtgtgtgtgtggtgtgtatggtgtgtatggtgtgtatggtgtgtgtgtgtgtgtgtgtgtgtgtgtgtgtgtctgtctgtctgtctcctcggtcagactgggacaacctgagggcaaggagagggaattccctgatgcccaaggtgtgccccgtgtagatcatggtacagagtggaggctcagcaaacagagcataaatgaatgagtgagtgaatgaatgcatggaatcttggggtgagtttccctgaagacagccccagggtgctgtggctgtaggagctggaccgtctagtgccttggtctgggggtggctgaagctggaggagggaaagaggccagtcctttgcagcttctggaggccagagtccaaggtcagcttctctcaacaggacccctctgaacccggctgacaccacggcctttggaagccatgtggtcagtaacacgctgtcacccttactgcagtctgttcacctgacctaatgactgggaacctcaggtctgtgactcaatgcccagaatgctgtctggtatgggggtatgggtcacacctggctcatctccaggacagccctgttctgcgtgtctgccagccaaggggtcacgtgctaacctggctgccccactgggggtgggaggggcagcttcaggatggggccgcatcaggccccatctccctaccaggcccgtcagtgggcaccctgagcctctctctctcattccttcttttgagcctgcagcactactccccgaccaaagcacactttcccttctcgtctggaggagagatggggcctcgtgccagctctgcccctgcctgacacacacgcttggcccgtcactgagcctcagtttccctctctgtatttcttggctgtgcaaaggcagtcgggggaggctggccctttaagctggatgaggctggtattttgtgtttttttttgagacgaagtctcactctgtcacccaggctggagtgcaatggcgcgatcttggctcactgcaacctccgcctcctgggttcaagtgattctcctgcctcagcctcccaagtagctgggattacaggtgcccaccaccacactcagcaaattttttgtatttttagtagagacggggttttgccatgttgggcaggctggtcttgaactcctgacctcaggtgatccgcccgccttgggaggctgggtttttgagctttgtgctgttggggcccagccctcagggccgcgtgggaacccccggggcggggtgttctataccaggaagtaggcagagggccagcccgaggacagttcgtttcttgccagtcccctgacctctcttggcacacagcctgtggcagcagcaggttgaagccagacgctgctcagacctcacaccacgtcgtttgcccaacccagagaaagctctgtccccggcttctggctccttctctgccaggactcactgggtgtgatgagttggtcttggggcactgtctgggcacagcctgtttgcccaacatggcctcctgggctccatgcttccgcaggtgggaggggtctggactggcccaggggctctgacagcggctggcaacctgaggttttgacttcagggtgacctgaatcctgccgcattatggaggctggagtctctgggggctgctttcccagagaagaagctccttccccatcagcctgacattggctccaaggactccatgtggctggagggctcagggctaaggggagggaagccccgggatggcagtgaggggtgagggaagatttgggaggtgacatctacaaagagacctgagcgggtggggcaaagagggggtcccaggcagagggagaagcaagtgcaaagaccttcataacccaggggagcgctgagaccaccgaccagcagcacccccacttcttcaagccaccactcctcagggcctcccaggggtccccagcctggagcaccccatgtggtagagctggtaggctgggggacactggggactgctgtcccacttggagcctcgggctactccgcccaggagcagcgatgtggaaccttgttggattttcatgttcccaaacatccaggagacacacagttgtgagtttccagccaggcgatctctaaggccagagcagcccttgtgggtgtcagtgaggaagggcagaaagactctggcctcaagctcagctccctgctgcagggagttgaacgcccctttggtgagtggctctagctaaacaaacacgtgttatcatctgtcaatagcggccacctccttgctggctgggctgctgctggctcaaagcccagagcagcccttccggggcactgcctgccacagccaacagtcagggaagggcagctactgccctgggttcaagcccgggctacccctgctcctgctcactgtgtgtccccaagcaagtcactgtccctgcctctctgtacagtgggaggcctggatctctctgctctgggaagacacccagccctggaatggttgggccacacttggggctgggggccaggaggaagttggagggctgggctggggctggggctgattagttgaagccagtagaaaagtacaggctttgctattagattccaggaaataacaaaagctgctaacagttaccgaatgcttaccacgcacccgacgtggtgctcacgcatcttttgctgttttatttcatccttagtgagttgggtactattatcatctccattttacagagcagaaactaaggctcagataggagacgctgcaaaatcaggaggtggtgaagacagaatgtgcccctagggtgctgatcagggccctcacctagaggcagatgcccccatctcctaaggtcaatggtcctcagctatcatcccttttttttgttttttgaggtggagtctcgctttgtcgcccaggctggagtacacgatctgggctcactgtaagctccgcctgccgggttcacaccattctcttgcctcagcctcctgaggagctgggactacaggcggccgccaccacgcctggcaaattttttgtatttttagtagagacagggtttcaccatgttagccaggatggtctcgatctcctacccgcctcagcctcccaaagtgctgggattataggcatgagccaccacgtccggccagctatcatccccttttaaactttctggactggccacgctgaacttctcaccctcctttccataagacaccctgtccttccatgtctccaggactttgcaggtgtccaccgcctctgccctttgggcttatgaactcctattcatctctcaggacccttcttaattttacctcctccatgaagcctgctttgcttggttccccagcagaaacagggggcactctccttggtcctcctgccacgcttcttccacacatgcatcctggcaattaccacattttactgatgttcgtgtgtgtttccctggagggaaaggagtgggtttcaatcacccccatatcccctgtgccttttgagtgaccagccgttattcggcactcaaatagggaaggctgtcaggggagcagctgactgcagagagactgccttggaaggaggagaggcccgggggtggagcggaggtttcgggtaaacagaggcggcctgactgacagaggggcatcagccaggggaaaatagaaccgggatccaggatcgtctgagtacgcagctgagctggagaaggttgtaatgaaggcagtttgagcaggtgtcagctgaggagggcagaggttaggggcagagcagggcgcatgaggtgtctggggtgcacccacagactgttgaggcaggacacgggtaccaactgacttgggtgccagacccatgtgaagggcacgatgggcactctcctgctgaatcctcaacaaacccagagcgctttcactccctctgctttacaagttacaaatctgaggtttgggaacaagtgaggcagggcaggtgccccccaaccttgccccaggccaagtgggtgcctgagtcaactctggtccacttggatgacagtcatgtgccaccacacctagctcagcctccccagcttgccgcttaccgcagaagaaaaacatggtttgactagcaagaggaggaaattagagttttgtgtatagaagagtcactctgggccgggcgcagtggctcacacctgtaatcccagcactttgagaggccaaggtgggtggatcacttgaggtcaggagtttgagaccagcctggccaacacggtgaaaccctttctctactaaaagcataaaaattagccgggtgtagtggcaggcgcctgtaattccagctactcgggaggttgaggcatgagaatcgcttgaacccaggaggtggaggttgcaatgagccaagatcgtgccactgcactccagcctgggcgacagagtgagactctgtctcaaaaaaaaaaaaaaaaaaaaaaaggaaaaagaagagtcactctggagaacagctaagtccaagactcctggcctgtagcttccagtcacgttctatcagtgctcaacttgccatccccactgaggctggtgtgatgaaatcaaaattacctgaccccggcctgctgctcagggagtaaccacactcatgaagagtggcaaaagtgtaacgtgctttgcagacgtgcttatgagatgtaaattgcctttcggtaaatagaaccctgcttcccattcatgtaattatagcttccagcctctgccccatgagagaaaacacttgtcctgaggggaatcacagtaataatttagagaataacacaagaaaccttctcctcatcaaatgcagttattcctttgccccggatgacatttctgtcaagtcgctattaaaatcaccaagtccaggctgggcatgctggctcacacctgtaatcccagaagtttgagaggccgaggtgggtggatcacttgaggtcacgagttcaagaccagcctagggaacatggtgagaccccggcccccacccccatctctactaaaaatacagaaaattagctgggtgtggtggtctgtgcctgtggtcccagctacttgggagactgaggtgggaggatcgcctgaacccaggaggtcgaggctgcagtgagccaagatttcaccactgcactccaatcttgggcaacaaagcaagaccttgtctcaaaaaaaaaaaaaaaagaaagaaagacaggaaaaacaaaacaaaacgaaaaaaacactaatcgtcaagtccagcagcctgcctggctggaggaaacctcggacttcctttgctgtctctaggcatgctccgctcccctccagtttgactcaccctttcagataacaagaggcctgcccccatggagtgcctgagggccagcaaacacctgtggcttcctaggagcccgtgctttgggcagtggcacctctcccacttttcaagctccctaagcatatttgacagtgggcgtggatcaccccacttatctggggcataatctttagacagacttctcctggccccacataactgcatggaaagtgggtagaaagcaatgattcctatttttcgcccatagggattcttttttttttttttttttttttgagacagagtctcgctctgtcaccaggctggagtgcagtggcgtgatctcggctcactggaacctccgcctcccaagttcaagcgattctcctgcctcagcctcccaagtagctgggactgcaggcgtgtgccaccacacctggctaattttttgtatttttagtagagacagggtttcaccgtgttagccagtttggtctcgatctcctgacctcatgatctgcctgcctcggcctcccaaagtgctgggattacaggcgtgagccaccgtgcccggccttttttttcttttaaagagatggatcggtcttgctatgttgcccaggctggactcctgggctcaagtgatcctccagcctcagcctcccaagtagacccacaggaatgccgaggagacagagactttcagaatcaccctggcaaaggtggggctgcgcagctggggctgggggtctctggaacactggcagctctgtggtccttacctgtgctctctagatatttgagatgagcctgggcaatatagggagaagcccgtttctacaaaaagtaaaaaaattagtggggcatggtggtgcgcacctgttgttccagctactcagcaggaggctgaggcaggaggattgctcaggtctgggaggtcaaggctacagtgaggcatggtcacaccaccgtactccagcccgggtgacagagtgaaaccctgtctcaaaaaaacaaaacaaaaacaaaaaacaagctggtgccttggagcctggggttaatgtctgcctctgtcacttgccaccagctgcacaatctcaggcaggccgatttccttgtttattaaggccccagagcaccaccaccctgagtggggtattccccgttcgtttccccacaggcccagtttctgtatggctccctgtatggagtgtggtagccccccaaggcatgttgctttgttccctgagccccagaagcctgcactcactggaagtccactggaggcccaccatgaaggttgtctgccatcctcttgggtgacccatgccatgatttctcacaactgtgaccactccactaccagggtcccgactaggaccttgttctcacaggaaagtgtggcccctccagagctctgagcgcctgttctccgcctgccctccacacttgcttactgctccaatgcttggcagtcctctgcccacagggagcctccaggattcaaacacctccaccttcacctgtctagtgacccactcagctcacagacttgccttttcttccctaacctgcaggtatgcacggcttctcatgcaaccccttctcctgccaacctgaaccctagggcccccagccctgctgtcttctgtggtctccacctgggtaaaggcccacgtgtgcctgagaggctcacacctgtgcagggaagtgctggccaccagcctgggctcaggacactgacctggtaccttgaaagtgatgagtagatatttctttaatgaatgataactaggtttctacagtcagcatgctttcccattctcaatttcaaacctccttcttactcctcaaacctcctggccctcctgtcttcactctcatctgcctcctacttaccagacaagagaaaacctcactctggactggctccctcaccacatcccaaatcctcttttcctcctggaaggaagacggatctactctctgaagacccccctgaggccctactccaagtaactccttcactttctttctcagaacacacttactatgcaagctccccgcctccaagattcaacttgggtctcctattaatgaaatgaacctcctcccttcccagtggtcatcctctctcgttcctccttcacaaactttgcctccaccctctcaacccatccggctcttccttgaagcactgacctaagctcagctctccgaagtcgaggaccaacagcgggggagcagcctttcctgccgcccccaggcctcagtgagggtgggtgcaggggctgccctcagccagctccctaggctagctcactgctgtggtctgagcatggccccaggttcatgctggaaactcagcccccagtgcaacagtgtgttgagaagtggggtctaagaggcaattcggtcatgaaggccctgcctcatgaatgaatggattaatgccattatcgtgggagtgggctcccaatagaagtcaagccccttcccctctctgcagcacgggacgatgcagcagaaaggtcttcctcgccagaatcggcccctccatcttgaacttcccagcctccagaaccatgaaccaaacaaacgtctattggttctaaattgcccagtctgtgatattgtgatagcagtacaaagagaccaagacacccactctcatggctttgattttaccccacattgaagattcaaatcttgttccctgctccaaaccccaagaacgtactaggtgctcaaacaacacggaagtgcaccttcactcctgccacactgggccccagctgctcagggcctcacactggttccagcggtctggtgtgcctgagcaggcccagcagcgctctgcctcccttcagccagagtagactcaacaaggtgggctgccccaaaaagacctaagtcactgtttactgcaagtcagctgaaaaccccacaaacctggcaaggaggacgcgggatctggcaacagatctggctttttcagaacattaccaaagcaatctctacgggcctgcgtctgtcttctgtcctccagattagcagctttacaacagtttccatgaatatgtgttaagcttaacggcctgggagaaaataagtggcagatggtggaggcagtgttagtgagcgaccccctttcccagtcttggccattcacacacactgcccctagcaatccctggtacccttttggaagaatccaaatttacttttcagccgggcatggtggctcatgcctgtaatcccagcactttgggaggctgagatgggcagatcacttgaggtcaggagttcaagaccagcctggccaacatggttaaactccatctctaccaaaaatacaaaaattaacccagcatggtggcgggcgcctgtagtcccagctacttgggaggctgatgcaggagaaccgcttgaacctgggaggtggaggttgcagtgagtcaagattgtgccactgcacttcagcctgggcaacagagtgagactccgtctctaaatcaataaatttccttttcccctgggctctatcattagcaaacacaagtaatgcccatgtgctctaggacatcagggagggagtaaacctcaccttcctttgcatgcgagggtcacacgtgccatagtcacagggagtgccctggagctggcaacttgcttgtactctgctctgggtgcgactgggttctgcagcagagtacgcaacggtgcagcaggtcagtgacagaaagttgacatttgagaaacgagtcacacaagggctcccggcaagttagctaccattggctattggaagagtagagagaaaacctgagatgctgaacaagactcctaagtacttaacagacatgccacgcttagcctttttctatactgggaacccaagtttgggtggatacttcaatcaattaggaaaaatcaataatcaatacttgactagtcccgtgtgtgcagcactcacccagattatcctcatgagtgaatgcagctcaaccagaaacttaactgatgacgggaccaggcgtccacactgatctccggcacagaatgatgctgggtgccaggaaagagatgtggagattaagcagcttgctcagggatactcagatgttgcaggtttcctctctcctgtacagtcatatttcaacagtaaatgggtgaaaaaaggacccaggccagtcatgagtatgctaactttgaccaatacggagaggggggaaaaaaacaactccaagtaatcaggaactattaatgcatttgggttgcaaaagccttcgatgttattgtgctccatgttgagggcaaacatttcttgggttcaaggactaggaaggtatgtagtttagtctccctactaaaagaagaatgtatgtttaccctctcttctcttaaaaatgagtggcaccagacacaagagaccagggcccagagaactcaacactcacaggtattgaaaagctttagaaattgattttacaaattgttttacatgaaaattttgtggagaaagtcaccactttgatcttttttttttcttttcagatacagtgaacaccggccaaattgttttaatttccgaatttattaaaatgattaacctcaatactgcaagtgcatgtacaaaatatttgtaaaaaatgtttttaatgaaacgttaaagaacttacctcaaatgctgaaaaagtcctttttcattctttcagtacaaggaatacattgtatctcaaaagtattacaactcagcaaaaacaatttataacagtaatttgaaaatgattgaaaattgaatactttacatatatttctatgatcatctcctaattcttacaatgccaaaatcttaaccaatcattgcataagctcaagctaagagttttattgaatgcaacctcttctaaactggtcaacggtgtgtggctgtcaccattccacacggtgaagttctacagcagatccggaacagttccgaggcccctacctttaccaacggaaattaggtttccctagaaggcatcaacagtggctgctgagtgcttgtgcataccgactcctgagaggcagtgatttactaccaaatgtcactgctttgagacccatgggaaggttggcctccaaagaggaggccatgataaaattaaaacatcaaaaataagttactaaaattcagctgaaaaatgaaaatgggaaatgtgttttgtcactttttaagatcgaaattcccaaaatagctatcgttggtattcaaataaggtttaagatttagtctctgaacctcttcaaaacaccccaaactaaggtgggaatacaagaggtgacccgctgccctccagcacctccagacacagggtctaccttcatcttcctcagtggcaggggttcacatttctatgcagggaccccatgagggctggacgtgctctgcaaagtgctccgggtgcctcggacaggtgctcctgagaggctgtgtgggctgccctacttcactgttgaagacctccagacgcagtgaacgggggtatgggtgggtgtggaagaaggtctaccacatgctttccaaacgcctgaggagttcgactgcaccacaacaaacaaggatgagactatgtaagactgcagaagtagttccttagagaaccaggagaaaacaatctactttctaaaaatgttcatgagtcttaatttctatttggaacctatgggcaatcaacagtcttaaggagcgtcattgaaacaatatccccccaaacctggaaactagtaggaatcaattagtagtaacagtaagcattgagattttctccactggacttttcatgaccttcagattccttttcatatttcaagacatgggctactttcctatagacactatacaaatcccctgaattgatttttacttaggaacactgtatatcagaaagtacaggtacacatttcccagaaataaagagacctactggtgtcaaacacctgttacagatttatattcccaaattctctgtccaatgatttgcaaaataatccagagaaatgaaaagaacctggtattgaacataaagtagtaataaaaatttgctcattaagttaattaaaattaatttctcaaagtgcttcaaaaaacaaattaaatctgactcctttttgtttaactgataatatagtcaaaaaaatctttgatgttttcataataaactaacataaactaacataagccaagaactcccactgatgcagtgcttaaaactatatatttataatttcctattttattggcatgaatatttctaaacttaaaaaccttcctggtaagttcttttaatttcttatgacaaaaatttctcacaacacacaaatatttacaacatatacattgttttcagttctttacattgaatctcaaagacaaactttttttataggttaccacagaacaaaagctgtgactcatgtttttatttcataaactattataagttaaagtgaatagatttttttaatattccttgtagcattttacaagtgcaacagaaaacttgaagaaccaaattaagatagctgtagttcattagataaatgttgcttgttgtcatcacgttgttcacagcaaatttttgaaaaaataagcaccaatcattcttgcaaagaacaattttatctaaaaggattgaaaagagttaaatacaaggtttttaatttacatgacaagcaataaatacgctgtatcgaacctcatcccacacactgctaccctcgtacatataatgaactgaaaagtgagctgtcacgtatgtcattttttttttttttttaagaaaccaatctgactcccaaccaatggtttgcgatattaacaaaggccacaaacagtacacctgggccagcaaacagtgtgaaactgacaaaactccaagggggaaacatctagcaaataaatcaaaaagccaaagatcattgctggtgatattagcatactagaaacccttaatatgctgctactatgatttgttttaaattattgtttagtcatatattaaagagccagctgatgctcttacagttaaaaaaactgtgtagccacattactgttttcaacgtcctgtgtggaaagttgctatcactgtacaattttgcttgagcctttattttacaacagggctttacctctaactcagaattgcacgtaagaaggctatttaaaaagtacgataaaaatttgcacaaatcagacttaagaattgagtcagtatgctgtacactttctacaatagtatgctgataagtgaagggacaatagaagtgctgccactaaactttcagttgaggaataattgactggaattttttatttctttaaagtagttatcccaggtcaagttaagaccaagagcttaggcattaagccttaaagactgatcttctcttctccttgaagaaatgtcaatatctatagagtcttttccaactattaacctcaagcgcttagctggaggaagaggaataaaatcgtcttcaaagtcatcatcatagtcatcctcctcttcatcgccctcagaagaggaggaatcatctgtactttcttcctcatactgactatagtcatccacctccattcgagactccaagagagaaagaggatcactgcagcacaccccattttcatgaagcccctctgtataagaccccctattttcctcatctcgttttagctggatttttaattttgtagaactactgcctgatcctgagttaaatccattattaagctttgctacatagagattgttatcgttgtcatggtctttgcttaacttgatgcttattttggaagagttcattccatcattctcttggtcatttgttttgctgctgctatcatgacgcctacgaagagtcaatttgggaatcccagagttattttctaggattaactgtgcatcataccttgtgattcgcctcttctttttactttttgcagttctaaagctgtcttttgttttgaagctatctgatgtcacaactgaacaaccgacgggtgaaggagcacagtctgtgtagctcacaggcacgcccacagtgccactgtgctcaccctggtcagaatggggacccatcaaatctggtaccgcgtcgtcttttccaggagaatcgtgcactggagtagattcctctatttttgcaaactgtttcacaagttttccttgtcgtgacttctttttggacatgcctgtgtcactcttatgacactttgcctcccctttttgtgcagtctcatgagccagttcttcctcctgcagcacaggagctggctgcagctgttcaccactgtcggggcaaggttccgtcacactgcttttatagccattcaacgtatttggttcaagcttgatgtcagaggcctccttcagatttgttcttgtcctcactgaccgccgagttatgtaggtgcagggcgagctctccccctgcgaatgagcacctctcacaggattctgtctgtgttctctcgccgcgtgtctagtcaagcacccgctggcaactgcggcttgggctggtccctctggctccttatcttttttaatgggcaaatttttatacagaactactttaggctctttcagtactaagtttcccatttcgagttttcttgaagcattcttttgctccagccgcttgcaatgatttctcaattttatctttgaaagtaaaggctttgcaggcttcttcagtttctttggtaccctggaattatttatatgagttagcttagatgaggtagagttggaagaagctggaattcttgacatagattgcctcgttaacgttctgctcttgctattcttttttacgccaactgaagattttcggttagaagctgtaaggttaaagagaaaaaggtgaaaagccttggtaacagcagagttcaagaaaagaatgcccaaacccaggctattagctacagcacgtttagattacacaaacgccaacaccacggctcctgctgcagattctgccagcgcacctgcattccctacactgcttctctttgaagttcttttctaatttatggggcatctattcatttttgaggtaagtagttgcacggttaaggagcttttcacagcagggacctagattccactctaagcttcttaatctgtcgtgacactggcccaaacgaacgctttcttctcctgatttagtagtttcccacataaaagatttcaaagaaagttaacatggttttttcctttcacagattctccttagtcatttaaaatgtttctaaaatccattgctcattaacctaaaggaagtacagcacttggccattaacatagagtagaaatagaatactcatgggctctaaggaacaaattctatcgcaatggtttcaaacaagaaaaacagatgctaagaaccatatattatcactctgaaaagtacagtcactaccgaaaaagaaatgcactattctaagttgtccccttcaactccgtgaggaacagaagaggcaaccagtgggctgtcaacttagaagagctgcaaagcttactcagccccatcccttcagtgacggccagatgccaacaatcacagtgaaggaagatgcacgctgctagaattgtacactctcaggacaaagggagatccaacttctttcctccaaggccaggatagaaaagggttacaatgaccctaatggtaatgacaacctgagtagtgatgaatatgattccatttgagaatgagcgtattcttatccactggaattatacagaactactaggtagaaaatattttttaaaatataaggatatttagataattcttttgctacagaatttctttatgcttacgaggcttgcctacaaggtggatcgaatagacgtgctgtcaatataaagaataaagttgaatggcttctcaaaaggcttcatttgtgactcaagcttaagctgctcctgtagtgtctctgaccttgccactgactttctgctatgttaatttttcctctgtattgacattccagactattatttatagaagttgttacacaagtcagtttctcaattacttagttcttgcaggtccagttgaaaaacttcttcctaatcaaaacactccatttacagattcactagagaagccacgataacaaaacgaatcatcaccacctctcatcagaacagggaggataaaaacaataaaacatgggtaagctcagcacactgcccaaccaagtgaggaccaggatcctgcagagaaatctgtcgctttctacatgcctcaggttgccagggcaactgccattccttccgcccagctaagcaagtaagttaccataagttcagtttttattgagagaggagcaagaatgcatcacaacattccaaaaatatcaaaccaccaagaatagaaggctctgcacctgaggtcaggagttcgagaccaacctggccaatatggtgaaaccctgtctctactaaaaatacaaaaattagtcgggcacggtggtacgtgcctgtaatcccagctactggggaggctgaggcaggagaatcacttgaacctgggaggcagagtttgcagtgagccaaaatcgcacgattgtactccagcctgggtgacaagagtgaaacttcctctcagaaaaacaaaaacaaagaaggtcctgcacgcacagactggctcataaatggcttcagggtacataaaccagcagaattcacagcaaagggattcacagtttgaaacaagaacatacttacacatgtgggctgctaccaaggtggcgcctctttttagaatagtaggagtagtgaactttgaatgtgattcaatttgagaacgagtgatttattatccactggaactatacagaactatgtgatagcaaatttttttttaataagaaatttagaaaataagaaaaaatagggaactcttcggctaaagggtttctttatgcttgcctacaaggtggactgaatggacgtgctgccaatataaagacactagtgaagaaaggactgcactgcttggcttccctttgcttggctctctcagatgtggctacgatgatcctttgctcattctatgcctcctcaaggactaatttatgaccaaacttagtggtttccaacctttgatttctcctctttccattccactctcatgacgtacctgcaagcacccttacacaacactcacatctatgtcatattctcaacagcaatccccgccatctggatccagcctgctcctccaatgagacagcctttggtgatctgacaacttcttgtcgtcaaacccagcacacactcctcagcccttccctttcttcatttctctgaatgtgacactgataaccactttttcttgagaaaacctttcttctcttggctgtcaaagagagcgcactctcctggttcccttctccatccctggcaccctccttcatcggccccttagactgttcttcttcaggtctgtgtagtcctaggccccaggtgacaagcacccattctcgcacggctattaccacttacaggctgacagttcccgaactctggccagacccgctcctaacttacagaaccaggtcaccaaatactgactgtctctaagcccctaaatggaactcaccatcaagtctcctgacgacgtcccctttcgaggtctccatcttggtcaatatcaccaccacatgcccagctgccaaagcagaaagctggaggtcctccttgactcctgctctcctgaactgcctcaccaagccaatcaccatgtgccgtggagtccacccctgcaatgtcactgcaacctgtctactcttccctgtctcgaaagccacagcctcctgcatgaactatggcagttttgtttttcctattgttttcccaacaatccgtttaccaccacatagccaggatgactttcctagtgtatcatgcagcttctgggctttaaacctttcagcaacctaatgccctaagaatgaagtctagaattttaacctgtgctcacatctcttcttcttagcctgtactcgccatgaagaaaagctttgactcaaactcccctctgtctatagagctgtctgaaaggccctctgctttgaataggcttcacttggccaacttctcatccccctgtaagactcagcttaggcaacacctccctgagggagcctctcgggactttctctgcaatgcctttcctatgtcttctcacagcacccaagaagctccttccttggtacttcttattttcacccgttggatgactcccattttatggtgattctgaattcggctctccccatcccatccctccttccaaaacattcactgttgacaacagaaaaccaaagcacttttatgtgtttgtctctaaactaacataaacgctccatttttgagcacaaaatgggtatgtatttgatgctatgtattacatcaacacagagatttcacttacatgttaccaatgtattctaattttgtttgaaaagcattatctcatcaaaagccctgtcaaaaggtatgctcatcaaatcaaaggaaaaaaaagacaggcaaagaatttgagaaatgtgacaaagatgaggacccagtagagtgacaagagtccttcactgtccaaagaagctgcactgtcctggcaggggttgagaatttcagacagtgaaggctaaaggaggaagacagtggccacaatgacaaactaaaagtcaatgattttaaagtccatcaagaaaccaaggactatgacctaagtggggtcagatgcacctgtgtttgagcttgctgtggcacttatatgcctcgtatgactcttcccctaggggctgggacaaatctcaaatacatggacctggactgtaattttaggtgggggtacacattcttctcagcaattactacatgctaggtgctgtgcaaaatggccacattcatcctaatgaacgccgttggaagggaaagcgattaaagctatgtgaaaaccaagcttacacgaactagcatgcctaaggtcatccagctggtgaatggcagagatgggacttgttaggccttcctgagcattaaaatcacgcttatgctgcctataaggcatatacagaagaattatggtgttggcctcaacttacgggtaaaggccccactgcatggctattatggtcatttcagggtgtcctcaaaatcataaggcagggtggcacaagacttccagtcagacaaaagagctgtgaccgacaccaaagccttcctgagcactcaggccgcactggaaatgcacaatcagcgtgaactaagataatacaagggccacagctgagcatctccagagctggaggatccagaaggcctctgacaggactttaaagacctcggtctcaaggagtttacttggcacaagcagctttcatctgacatgactagcacagactgccaatggctacctggaacggggtgttagaatttggaagcagcccgaaggctcagcagaaaagtgttcagatcaactcttgacatgagtgacagggcaggagtgaggagcagcgccccagcctctgcatctaggacaggtgctccatagttaagatcaacttctccctctggccgattcttctggggcttgtcctgacttgtggcacctgcagagacccgtgtccgcatcttcacagaccgctcgcgagcctctctctggtctcaccttccctatcacagcactaacttcagagggggcagcccagtcagcgaggcataagaggcctgaaaaaccagaatcctccagtcctggcattctaattcagacctgtggactggatttgtgaaaacggattccttgttgtctctacttctggatgctaaagcaaagtcacaccatagctctcaaggtactttccgaaaaagcacctgtatggaaatttttcttccaactactcagaacatttttttatacatgtgttcaaagaaagcagttcctctgtcagctgctaaattctaaacgaaccacatgataaagatgagcagccacacagaaaaagcactccgcaaacacatacacagcacatgcacccaccaccctgggaggagggactggcagtgctggctttcctgcaggatgtggcttccagaacctttctttcagacaggtggaggggatggctgagacaaacaccaaaagaaatacagcctaagagaacgcatgtaagaactcaagaaatccttatgtgaacatgacttaacatacaatggtctcagagacaactaaagccttgagctccttcagagagagcactgagccatgcctatccactctgcccatgacctcagagttagtcatactgatccttggattgctccaatcatgctgcagaaagggaatttgaataagccaagcaccccaatatcagcagtccctgcaaaatgtacacctttcttctgtaatgctgagacttcagcttaaagcgattattcagtccctctgaacttgaaagcctgtgcctccagtttgttctgcttacttgtgcacctgtcttatcctggagctaagtaaggcataagctccctgaggaaagggcccaagtctcaaacatctttgtatgtcttcaagaactagcaggatttcagtaagtatttagtttgttaatatatattcccaaatatttggtttaataaatattaatagttaaatattagtacacccaacatcttccaaaaattatttgtattcttatcttttaaactaagtagtatattgagttcagtagctatacaccagtaataaagttactacttaagcataaaacacctacatcacatagccattcaacataggcaactctgtggctgtctccatatacagatggcagcacgaacctaagtgtttttgtttaaaaatcacaggtctctggccgggtgcagtggctcacacctataatcccagcactttgggaggccaaggcaaggcggatcacctgaggtcaggagattgagaccatcctggacaacatggtgaaaccccgtctctactaaaaatacaaaaattagctggatgcggtggcacgtgcctgtaatcccagctacttgggaggctgaggcaggagaatcgcttgaacttgggaggcagaggctgcagtgagctgagagtgtgccactgcactccagcctggggacagagcgagactccgtctcaaaagaaaaaaaaaaaaagacacaggtcttactatgttgcccaggcaggtctcaaaactcctaggctcaagtgaccctcccacctcagcctcccatgtagctggggctacaggtgtgccaccatgcctggcttttaagtgtttttatgtctgcatttataaaatgggcttcacaagtctccagtttcaccaaggaaccagactcagaaaacaaatggtcgttatgctgcatttattatgagaatcaacagtcaacagttaatgattgactaactcttgttgttcactctggacattaacgaaaaagactggaatagggctacagcgctgcttttatgctacacgggttatgcttggactctgactcccagcagcaggtagattcaggaattcatggcagtgacattcaccatcatgggaaacaccttcccttttcttcaggattctctgtagtggaagagagcacccagtgttgggctgaaaacatctgaaagtagggagaagaacctaaaataatcagtatctcagagggctctaaggtgccaagaagtctcactggacatttaagtgccaacaaaggcatactttcggaatcgccaagtcaaaactttctaacttctgtctctctcagagacaagtgagactcaagagtctactgctttagtggcaactacagaaaactggtgttacccagaaaaacaggagcaattagaaatggttccaatatttcaaagctccgcaaacaggatgtgctttcctttgcccatttagggtttcttctctttcctttctctttgtttagtcttcgttctctttttcagtttccatcagatcttgcccccacacaccactggaatctcagaggttgcttctttctcctttccatctttactcctactttctggagtagccaatacagcatgtcacaatacggcactgttcaaaatgctcctctatcacaattctgagtctggtactggtggtctgctgaactgagtcagttcgttttgaaaaaggtcagcaagcaatgaaaaggtggaagccttaaggccagaagctatgaattccccaagtccatcatcttttctaacaaactggctaggcactggaatgtatagagtctaatttaattctactcagtccttttgtcttcttgcaggacttagcgacatcatcacagtctctaacaccttgaaaatgtttaaaacatatgatgaccttggaacatatgatgaagaactcatatccagttaccaaggtattcaagaaaaatagtctagaggacggtactgaagttagagatgggatacagactgtgcctctactcaaatcacgtctagagccttgaagtgcagccaaagctcacaagtcccagtctctctgagtatttaaaagtttaaaactactgaagcacactttataaagcaaattgtgtgaaaatacttttaaaagatatgcttatcaaatctcccttacttacttgcattgtttttttcctgagtggtatctgcatcagtgttagagctgacagattgactgtctgaatttttgctgctgtcacctaactttttaagcctatttaaacgtttatctgtttctctgagtccatatttgctattgataacaggagcaggcgcaggcagtcccactctggatttaaaagcaccagtgccccgtctgaaagagaaaatagcacaggttaaacaaatagaacacactttcttataataagcttaactgctgagggtacttggctacaggttaacagatgtgatgagctgctgaggccttaatcaccactggaaaccgaagactagaactcacaaaggaaattaagtatctatattataaaattaactttaaatctatatttaaaataataaaacaacttgttatgactattatcaatcattaattgcctatgagaaactactggaccttgtaaaattttttccttttttttttttttttgagacagggtctcactctaccgcccaggctggaatgcagtggcacgatcatggctcactgcagcctcaacctcttaggctcaagaagtcgtcccacctcagcatcctgagtatctgggaccataagcgtgtagcaccaccaccagctaatttttaaatttttttttgtagagatggggtctcactatgttgcccaggctggtctccaactgctgggctcaagggatcttcccagctgggtctcccaaagtgctggatttacaggcgtgagccacaaagtccagccctttaataaacattgccagattactttgccaaagggatagagcaaatcatggtcccactagcatggtgtgagttcctgcttctccacatcctcatcaacggtacattgtactccttaaattttaccaaagtgggccaggcatggtggctcacacctgtaatcccagcacgttgggaggctgaggtgggcagatcacgaggtcaagagataaagagaccatcctggtgaacatggtgaaaccctgtctctactaaaaatacaaaaaaaaattagcccggcgtgatggcaggcgcctgtagtcccagctactcgggaggctgaggcagaagaattgcgtgaacctggaaggtgaaggttgcagtgagttgagatcgaaacttacacagagcaagactccgtctaaaaaaattttactttttgccaaagtgatgagtgaaaatgaatacctaatcttgttttaatctcatttatggccatttttttcctgtgaagcatctctgcatctctttttcctttaccttttttcctatttgactatgtcttttccctataagcttataggagctttttgttattagaattttttttttttttttgagacacagtcttgctgtgtcacccaagctggagtgcagtggtgcgatcttggctcactgcaacccctgcctcctgggtgcaagcgattctcctgcttcagcctcctgagtagctggaattataggcgcgcaccaccacatctggctaatttttgtatttttagtagagacggggttttgccatgttggccaggctggtctcgaactcctgacctcaggtgatccacctgcctcagcctcccaaagtgctgggattataggcgtgagtcacacgtgcgtggcctttgctttaaattttctagagtaaaatgtgcagtacttatgaacatattacaattactactgtcagtacagtgtagcagagaaacatgcttcaaatgtatcctggagtgtctagcgcgactcagtgtctctgcacacgtgattccgtccattctcacttcttcacggagcctcttccttttaccctctggctctcagcacagtgtgtgtgtccccttcactgaactgccctgacagctggcactgtgctggtcttgtttatcctgcatgcacttggcctaacattaagtaactgttcagttaatatgtaatgaataatggaatgagctcctagatgcatcttcccagctaatttctgtaaaggcagaaacaatttggtgtttatgagaacttcaagaatatatgcagccaatcttgaaatcaaactgctcaaacagtctgacaatagccatggccactattctccatcatgctgttccatttaaaaaggacttacacacgtttctatctacttctcacactaaccttgtggagtaggtgggattatcctcattttcaccagtgagaaaacagaggctcatgaaagagaactaatctgctcaaggaaaatgactatacctgcagttctaaaccagggaaagagctgtttcggtgttggtttggaatcctcagtatgtggttaggtgttttcaggaccgcctccaaaaacttcattatatatatttactctattcattcatttaccaaatatttatcaaggacttactatgcaccagggtactgttctgtattctggggatatagcggaaaatgaaacagatacaagcccctgccttcatggagctcatattctaatgggaaaataaccagaaaccaattattgtagttaacatttgtgtattaactgtgtgctattctacatgctttacaggaaataacaaatttagccttcacatcaaccctacaaaataggttctgatgttatccccattttacagatggggaaattaaggcacaaagcagctaagtgacttaccctacacatcacatagctaatgaaatgcagagttgcaggattccaacccaggcagtctgatttcagatgataggcacttaactgttatactgtttcctctacaaaatgattttgaagaattattgaactataattaaactactttaaagggtattctctggactggtccaagatctaaccaacatgtgaataatttttatgtagaaaaagataaattttatgtccctctgccctggtaaaaattcagcagcactaggaactggttttctgccacatctttatggcaaggagcccactcagtgctgggagagggatggctacggtagcactgtgacttgatgactccgtcctctctcaccacacagttggaaatccctggctatccagaaaggagggaaatggcaactggggtatctgcccactgcaacctctaggctggctatttgtaggtgttttaaagtgggagaagtgacactaataactctgatcataactccaaaagcaatatgaagtggaaagaatgaggactctgaagttaggctgactggggtctgatacttatgttctggtactcgcaatgtgggcacctcctagctctctcatgaatatctgtgagaactgaacaaggtggtgtgagtaaagtgcctggcacagtgcaagatgtgcaaaatggactccaggtttccttctctgtggcctgtgtggtctgtactgcctttgaggggactcttcctgcagcccttgcctgcctgagcctgtgacgctcccttcatggtgctctcacacacagaagtcactataatgagcaatatgaactggtggtcctgccaatgaagatctgggggatttctgtaaagactccaggactcttgatgagacataagaagaggttccttattgaatgactgatatcagggaacaactcttaagaactgtgaaaccaaaattccagaagacacagcttgataatatgcaagacgactatcagtggtgaactccacttgacattttgagtagcggcaaccccattctggcattgcgtgtgtgcatgtgtgtgagctattaaccattctctccttaagcacatctgtattctggcccactcttagctggtaatattaagattttaaagggaaattttaaatttattgagggacattccaatgtccctaaatagctgtgcagcatttgactttgttcatacacactgcaccagccgctatgctaaagaacataaagactatctctgcatttaaacaacaaagagataatgtgagtttaatccccataatcaggttgttaacaaaaaatgtttaggctgaacattttacttaataccttacctttcgcaagtgtaacactcgcagaactcattattttctccaaagaacccatctccataataacaagaaatttcttctccaggttcaatgtctcttagagccttcacacatgctgtatctcgaccagttgacacaaactaaaataaaagtaactcagtaagaaactcacacctgaagcaaaaacaaaatacttgaagaaaatttttttaatgcttaccttacaattaggtctgcaatctgaaaaatgtccaaaagataaagtcaattaactgttgataagatctgaaacacgaacaattatagaaatctgaaataagctttccatataactttacaacttttgataggagtttaggtctcaagttcaactaaaggaatatacatttattttaataagtttgtggaaacatttctatttcaaattctcctttaaaggaagataaaggtttgactgaggttgacaaggccattctagcagttagcaggaatggccaacactagcgccaacaccttggaaacacagcttaccatggtttataaacgcagcaggacccagccagagttgagcacagtttttccttgtggagtacatgacactgaagtcgttttctccatgtctaagtagcatgttctcctcaatttctgaaagttcggcaatacaacccaccagtaattctattttgtcatttcgtttcctatttaaaatatgtgatgtgttaaaaattactagtaattaaatatagtaaggcttcttttaataaaataatcctgacaataaatatcagaaactgaaaaggcctagctgtctatactttagttagctcactgggatccccacctggctatcttctctcctaccctggagctccacagccttgtgccatggttacttgtgtacctatcttattcctgcaagagaatggaaactcaaccaggacagggactatgccacctatgtctctgaatgccctggtgtggtgttttgcaagcagaaagtactcaaatacttgcggcaatgaattaaactttctgactgctggatgaagcaggcagggaccagtggcagtaagggttatgaggatccggaatcatggtgccactctttagagcacaccatctgctaggaatataatgcaagccaaattttcaatcttaaattttttagcagccacattgagaaagttaagtgaatataggtgaaattactttaacaatttattttattttattttatttgagacggaatctcgctctgttgcccaggctggagtgcagtggcgtgatctcagctcactgcaacctctgcctcctgagttcaagtgattctcctgcctcagcctaagtagctgggactacaggtgtgtgccaccacacctagctcattttttttttttgtatttttactagagatggagtttcaccgtgttggccaggatggtctcgatttcttgacgtcatgatccgcccacctcagcctcccaaagtgctgggattacagatgagccaccatgcccagccaacaatatattttaacccaatatccaaaatacgatttcagtaggtaatataagaactatgaatgggaataaaatttaatatgaaatctggtgtgtatagcacacttacagcgcttctcaattcagactagctacatttcaaggactcaagggctggtggctactgtaccggacggtacagctctaggactctagatctcaaacctacacacccatctgcaacacagggagccacataatccaactagcaggctcaatacatcctgaggtaaatgaagcacatttcatgtacacacactcaccccagaggcctggcaataaagttcttttacctatccattttcagatatctgaccccccaaatttttgtggtagaaatatcagagggtgggtacatgaggagctacatgtttttcctgggagataacatagggaacaggcatgataggaaagaagatacagtagtatattctctttcatctgtaacttttatcccttttagctgggctcaactctgacttaattttgagatagagtctcactctattgcccaggctggagtgcagtggcgcgatctcagctcactatagcctctgtctcctgggttcaagtgattctcctgcctcagccacccgagtagctaggactacaggtgtgtgctaccacgcccagctaatttttgtatttttagtagagatggggtttcaccatgttggccaggctggtcttgaactcctgacctcaagtgatctgcctgcctcggcctcccaaagtgctgggattataggcgtgagccaatgccccccaccaactctactatttttattgaagctggcatatatacatatatatatatctgtatgtatgtatttttaagcaactaatgctttagggaggtttccacccataaaactaggatcattaaaactttagccccaacctttcttctaggccagtagaagactgactgtggaagccaggttatctaatcacggtatccacaactcttcagcaatcatatcactgaacaggcatccagagtcaataaaggaaaatgaaaagcaatttggcctagagatgggatctggttcaactgagacttccgatttccccactctgactccagctgatgggccaaggcaacggcgatgcattggctacttcagggtaaactctggcttcattccttaccatgaatttctcagcacttcaacaataatttagaagagaactttaaattaaattaaaggcttatactagtagaatagttaccactcttttgttgcaactattttggctccattttgttctgatgagtatctattacatggcaatatttcaaatccactgtcagttgcaaacattcgcaaataaataaatacctaaaacaggaaaaaaaaattgataatgactttaaatggtataccctgctagactttcttacaattataaaagcaaaccacccgcaatgatgaaaaaaatgtaagatctagcctgagcaacatagcgagaccctgtctctacgaaaaacattagccaagcatgatggcatgtacctttagtgccagctacgtgggaggctgagaggaagaatcacttgagcccaagagatggaagctgcagtgagccataatcaggccactgcactccagcctgggtgacagagcaagattctgcctctaaaaaaacaataaaataaacaaaaaaagtaagatcattaggtaacaaactttattgttactcaagagttttgaatgtcacaatttttctcattttgcaatatttgcattacagtaactagctgaacacctctaaacaaaaaattcaaaatcctcccatgagcatttcctttgagtgtcaggtcggtgttcaaaaagtttcagattttggagcatttcaaattttggggttaagggtactcactctgtatgagtacctaatggcttgtttcccttaaggctcataatgaatttcacctctatatgacaaagttttctctccttttttggttttagagacagggtcttgctctgtctcccagggctggagcgcagtggcatgatcatagctcagagcagcctctaactcttgggcacaagcaatgcttctggctctgcttcctgagtagccggaactacaaactacaaaggtacacactactatgcctagctaatttttttattcttatttttttagagatggagtcttgctatgttgcccaggctggtctcgaagtcctggcctcaagcaatactcccatcttagcccccacaaagtgctgggattacaagcatgagccactgagcctggcccagttttttctctggactgtcatccaaatgactgtatgtgttacaagatcttcagactgattagttttatgaaaaataaatttaaaatttcagtattaactaacatttagggttttaatttacttcactattcttatccaaataggttaacagcatcagtcttaataaacttacatgttctttgaataatttctcctgcattttattcttgttgagaaaatagtgccgtgcccattcgcctgaagtcaaacatttgaaggctttctccaagtgttcatctttcttaaaacgttcaattacttcctttagttcttcctgccttcctttaataggcctaaatctgaaagaaatcaaaagaatgaatgggttatctgccacaatccttgcgccactgatccatcttaacagatcttgagaaagagctaataccctaaaaacagccatggttatcagagcaaagatctaagagaagagaacaacaatcaatagtcttgattactactattcaagtaatactgatcacctggatacgcaagttctcttttttcaatctgttattttaatatttttatttcactgttatctcagtaacttctcttttttcaatctgttattttaattatttttatttcactgttatctcattaactgtgaggtgagcagacgattcaaacaaaagctgtctgattcagacttacactagtcgtcaactttgggagacacaaaatcaaagctctagaatacagcacacctaatttagagttagaatgacaagaatctttttaaaacatgcaaaatcaagctggaagagtgccaggcaatgaatttcagaagtatgatgatgtaaacaaaaccatgccatacacaaaaacattctttatgtacacagtcagaaaaaaccccaaactaagtattccaacaggcttcgaaacacaccttgatgttctaaccacccatgtcaaagtcatctttgatgactgcattcagagaacaaaacgagtacaagcagtgttaactctagtggtgaaattgctatactggtaatgtaggaaaactgatggggtagagttgttttttttttttttttttgagatggagtctcactctgtggcccaggctggagtgcagtggtgtgatcttggctcactgcaacctctgcctcccgggttcaagtgattctcttgcctcagcctcccatgtagctgggatgacaggcgtgcgccaccatgcccagctaatttttgtatttttagtagagaccatgttggccaggctggtcttgaactcctaacctcaagtggtctgcccaccttggcctcccaaagtgctgggattataggtgtgagccactgcgcctggcctgcaggggtagaattgaaaaggcttccattgtagaatcagccacactgatgtcttcagaatattatcccattaggtctgtatttatgcatgatgcagtcatggcccaagcaagacaaatttgtgaacccctcattctaaagctgtgttttcagtaaaacgtgtactataaagttactagcatcttaatttcaaattttcttttcatgtcaatttcataaagctaattctcccaaataaagtttttattttaaaaaaaagttttattttattttcataaagctaattctaaccggattatggcccggtatggtggctctcacctataatcccagcactttgggaggtcgaggcggatggatcacgaggtcaggagatcgagaccatcctggccaacctggtgaaaccccgtctctaaaatgcaaaaaattagccaggcccacgtagtggtacacgcctgtagtcctaggtactcaggaggctgaggcaggggaattgcttgaactcgagagttgaagttggagtgagccaagatcgcgtcactgcacttcagcctggtgacagagcaagactctgtatcaaaaaaacaaaacaaaacgtccaacagaaaaaaggaatcaccgattgccattcaaataaaatacattaagaaaaaatattagtggttcaggagaaaaaaatctttatgtgtcttactctgacatttaaaattgtacatttcataaacctgaatatgctaaaattgaggtaagatctagcacaaactccagcaaaggaagcattcagcagaattttttttcctagagaagctatcatatatgtattcatagtatttcagtaagatttcaagccacagtatttcatcaaggattattaggtgctgtgttgtgtatacagtggcatatgaagtgctatggtgaaaaatacaagagaagacatggccactgttcttgaatggaaaatttaattgggactaaaagacatatatatgcatcaaacagttaagcaagtgatcaatatgcaaatgcatgttaatatgctaaaaactgcattgctatagcacctaaaagtatagaaattataactagggtgcaaaatgtacatgggaaaggtttaagaaaagcacattataagcaggtaagaatcaaaaggaaggaagaatgaggggaagtctaagcagaagatcttaatcaagctggattcaaagagttgaccagggtcagctaggtagcaataataaagtaaagtaccagaatcaggaagaggaaagacatgaggtcctgaacaggtataatactgtttactggacaggatcactggaagacttcaggtgtattaatgcatactgatactaccaggaacttactagctacacactctagtcattttttttttaattcagtaatcctgaattctcacaactattagctgaaccatctgaaagttcaaacatatcctagagataatactgaagaaatgaacagggccctattttccattttcaatcaattggtatacaagcctttacagacagataaatgcaagtcctttaaacaattcagaacgtcttactagtctgtcgacatatggtgtcagagaaccaccatgaaaataaagagctgtagaattgggaaagcatccaaatatccatactcaactacttgtagccatcacaattgattgtgtcaagataccatctccaagaaatccaatggaaaccattcttgctgcaatcctacactacatggttatttgcacatgaaggacagataagacaacaaagcagctctcagctaaggcatgacctgtcgagcaatatgaaatatgaaatatgaaatggtgggaaacagataacccgtgctttgtgtggcaatcagaaaagcaatagttcactttaagcaaatgcaataaattatccatgccgttaaatgacagggctacaaacgacagaaagggccaagctatctttacacgttcaatgtgaaagtgaccaatgggaacattatacaaaagtaagttatagacctggaatgaaacttggctatttttaataggctttatgtgtgttctatgctttctgaaacaagttcattcctatctaaaaatgccttcaggtaaccttggttttgtttactttttattcataatgccaaacaatttacatgctaaaaccaacacaaaatagtcaactcttgatttagtagtattctgcctaccttccctgtgttgacttctgtttctgctttcctgactttattgcctcaaacataaataaaacccctgaaactatcccttgctaccaatagcaagaacctctatttcactaaaaatataagttgctgtcccaaacctgttaaaacttactgtcacagttggctgctatgggcatgaaatgacagtaaggaaaagggggaagaaaatggttaagggtgcagacaggcaggagatgagacagttgttttcaataatcctacagaagtatgtaaaagtcagctggctgatagtccaaatcaaatcccattgtaacaaatactgtggaaaataaaagttaagactgttatacctattagggctggtgcaaatgcactgaaaaccttagggaaatttttttttttcctattattgaacagaaaaataccctctctccttaactataatcactctaaatctcccatacaaactgcataaaactatccttttactctgacacttaaaggccagataatttagaacagcccttttgttccacaaatgaggaaaataaggcccaacaaggctgagtagattgccaatgacttagggttaatgaatggaagacctgggatttaccctggcctttctggttcctgttatatcacctggctcaggagagccttcctcacattgtttcatggttagaagaggatttgacttgcgtttgccattgaacatcagcactgggcccagccagagacagctctagcttgtatactgacaatacagtggaagggatggacgcaaatgtgaattttaaaatttcgtatttgggtgggggggtgggtgacaagggaggcaagaaaaacagttatttggcatttccaaaccaatatgccccgtcctccctcccttaatagaaaatttgctactttaaatcaaccaaacatatctattttttctctttttacacttccaatcaatggctggtataagaaaaataaaaatgtcatttacaattgattattattaaaggggcaggaaaaaaacatatgaattcacactcccacacacctgttccccactctttccagagactcacttcccaggttttcttgctatttggtttttctgtctccccactgtggcagtgaagaaaagttgtagactgtattagctgtgctactgtgcccttcattagcatgcacaatcaagagctgactggaggggtggggaacaggaaggggaacagaaaaaagggagacagggaaggagagaggaagagagaaaaatgctcaaatatttaagatataaaataaaaccatgaggcaacatagtgaacacatttccccctctgaagaaagtttagctgcaaatccacagtttgtagacgctgagtgaggagtcgcagatcagctcttcagtccttcttgacctgaaaataaacgagaaccaaaaacatacctggctgagtcctgcaatcagtgctcagctaatcacatggagtgactcctgatcttttgaagaatgatttgtttctcttaaaatcaccctgttatgaagtacaagtggttttttaaaaaatacaactattatcaaactactttaaaaggtttgtaaaatgttctaaaactctaatttatgctgacacttcaaattacttaacataaaagaacattttaaaaggctagaatgggttagtcagtatctcattgtttttaacacacactacctacctcacagggttgttgtgagaaaaactgtcagattttgaaaaatgccttgagctcctcgaaggaaaggcgctatataaatgcaaaaacaaacaacaaaaataaaaagctatttgtataatctgtacttgtaatttctaaacagacttacaatattcgttgttgcaaaaatctttaaaactctgtgataatcaagaactttaagataccacaggtgggcgcggcaggatagaagccatgctgctgaaattctctgcttcccatagaacacaccttaccatgaagttagaagctttgaaaacattctttacggattctagtcaagcacttaattttaaaatgatatttaaagtgattcatattcatatccaatagtggatatgaataatcaaatacatataaaagtgaaataaaaattagatggttataacagtagaaaaatgagtaaggactgtacaggctgacattctgattagaaaaccaagaaaagttgaaaagagaaactcagtgccctgaagtgactcccctgatgtttaaatgctgtctcctgctcagctcactgctggcctgagtcgccttcgcgcctcaggatactgtgacatctcagggtcatgcagcctcaaaaagggggcattactgaaagcatcgatccctttcttaaaatatcccgctcccactccatttaaaaaccagaggtataaacaacaactctttttttcttgttaaaaagaaaactttaggtttcataattgacaaaagtcaattaagttcaaatttctcccaataaattgaaattagcattttgttcgtactatttctaagtattcatgctacaactcttgcttgttagtaaatgtaaggatatattaagattaaaacctgtgcactcaaaacatagccagttttgaaaattctccaatcattaaacatctactctttcttttttcttttttttttttttttggagatagagtctcactctgttgcccaggctggagtgcagtggtgtgatctaggctcactgcaacctctgcctcccaggttcaagttattcgcctgcctcaaactcttgagtagctgggattacgggcacgcaccaccatgcctggctaatttttgtatttttagtagagacggggtttcaccatgttggtcaggctggtgtcgaacacctgacctcgtgatccacccgcctcggcctcccaaagtgctggaattacaggcgtgagccatcacgcccgggctaaacatctactgtttctaaacattcttcctgttggtagactgaaagaagtaaaaggaagggaaaagagtataaaaaagagaaactaaaaagtgacaaattacaggtgcataaacatatgaacaaagagcgcactatacaaggaacaggcagagagcttagaaaattaaaatccaagagcagtacatcttctggtcacttcttttgcaccccaaagagagagaagtccataaactaacaatttaagaagtatttattggctatttactaccttaattaagcattatcagttttccttattttctaaagtcacattctggtaaattcttgctcaaaagatgaagagctagaagggatagttttattttcaagtaaattcactaaggttaattgaaaacatatacctttcaccaagattattgtaaaggtcattaataaagtttctgttcccaaatatcagtgtacacaagagtgtaaaagcacacgtaaacggaacactctggtgggaagtaggcaggccgtcccctgcactcccacaccggcctgaagtgctggcattgctaggaacccaggctgctctaaccagggcaacagaatcgtctgtacttccacaggttattttaggaactgtataattaaatgttggactaaaaaatacttaaaaaatgatttcttctgcaagtttaaccagctttaattttagatgcttcaattctatggggaaaaatcttaggcactgggtgcattttaacttaggagtcctcagttaatgtcttgagttccaaaaatatttgtgtggtaatcctgaagtttacatttatgactacatagttttacgtgagccctaggaaactcctagtaaggtatttttatccacttagcacgtcacaatgaaactgagaggccagatgttttaggacctagctattccaagtgtagtctgggagcttgttagaaaggcacaatctcaggccccaccccaaagctactgaatcagagcctgcatttcaacaaactcccaggtgactctcatgtaaactaattataagaagcaatggtataggaggacttttacagaaaactggagtgcttccttttgttttttaatatagggtttcactctgtggcccaggctggagtgcagtggtatgaatacagctcattgcagcctcgagctcctgggctccagtgatcctcccaccttgccctcccaaagtgctgggattacaggcatgagccactgcagcagaaaactggagtatttactattgaagatgccagtaacaggcagccttctggaatacggcacggggattttagagtacatgaagttctgtcataagccactaaaactttcattgtaattttttttttttttttttgagactgagtttcgctcttgttgcccaggctggagtgcagtggcgcaatctcggctcaccacaacctctgcctcccaggttcaagcgattctcctgcctcggcctcctgagtagctgggagtacaggcatgtgccaccacgcctggctaaattttgtatttttagtagagacggggttttccatgttggtcaggctggtcttgaactcccgacctcaggtgatccgcccacctcagcctcccaaagtgctgggattacaggcgtgagccaccgcacctggcccattgtaattctgatgtaacgctgttttatatgcttccatatcttggtaataaggcataatcaatataactttcttgatgaccccaggtcaagattctgggcctttgtggtgacattctgaatgccactagactactgtgtcaaagagtgattcattcacacattcacatttcttaactcaaaaaaaaaaaaaacaaagaaaaacactgggggtgctacagggtgacaaatattatcagcatcttctaggagaatgagcactggtctcatgttcaatgggcaaaaaaaaagaaaagaaaagaaaatggacttaaaataatgcaaattagttttttgtttttagccggagtcacgctctgttgcccaggctggagtgcagtggcgcgatcccagctcactgcaacttccacctcccaggttcgagggattctcctgcctcagccttccgagtagctgggactacaggcgcatgtggccaggcccagctaattttttgtatttttagtagagacggggtttcagcatgttggccaggctggtctcgaactcctgagctcaggtgatccacccacctcggcctcccaaagtgctgggattacaggcatgagctaccatgcccagtcctgtatcttttttttttttttgaggcagtctcactttgttacccaggctggagtgcagtgatgtgatcttggttcactgcaacctctgtctcccgggttcacgtgattctcctgcctcagcctcctgagtagccaggactacaggtgtgcaccaccacacccagctaatttttgtatttttagtagagatgggatttcatcatgttggccaggctggtctcgaactcctgacctctggtgatccacccagcttggcctcccaaagtgctgagattacaggcatgagccactgcgcccagcctggatcttaatcaatcagggcatccaatggcagtcatttggcagggaactgtttaaataatcccccaactccattccaatatttcacacttcattttagtaggtaaagatatatgacagaaaattttatggtcagacatggtggctcacgtctataatcccagcactttgggaggctgaggcaggtggatcacctgaggtcaggagtttcaagaccagcctggtcaacatggtgaaacctcatctacactaaaaatacaaaaattagctgggtgcagtggtgcacgcctgtaatcccagctacttgggaaactgaggcagaagaatcacttgaacccagaaggtggaggttgcagtgagctgagatcatgccactgcactccagtctgggcgacagagtgagactccatctaaaaaagaaaagaaaaaaaaatttatgaaaaaaacaaaagcatatttttacctgaattacttcttttggatttagactgtaattgataagtgaggcatatagtatcttaattctagcaagggataaaattaaaaggggggaaacaggacacaagactttcctctaattacctgtactcaccaattcctacctctcccaactactgatcagtgaccacctacctgggtatcaagttcccccagggttgccactaaaatcagaactatataaccccagtccgggtgtgatggagatgaaagtgatgggccagaactagctctatcttctaaatccctgctgttatgcttttccaccaggctaaaaaaccctttgccatagaggttaagagacaaagcaaagttgcaaagctctgacctgtttggtggcagatacatttgtgaaatgatctaatggtcttttttgagggagaaatggtatttaagagaattaaagagagacctcagctgttaaaagatgacagatttcaagattaatgtaataatgttttttatatacagcatttggtactcaaaacacttacacatccactttcttacctgcatactgaatataaacatgtctttaaaactattcgctcttaaataattagctgaatcccaaagattaaacatgatgacaaaattccccatctatacagagacaacgtgtaagagaaaagtctataataaaatcatgaaaaaaagggatgtaccctactttaggttggaaataatcatacactttcaaggtgttacaggatgcttgtcagatttttcttttcgctaagataattgtcatcacctttttttttttgagatggagtttcgctcttgttgcccagactggagtgcaatggcacgatctcggctcactgcaacctccgcctcccgggttcaagtgattctcctgcctcagcctcccaagtagctgggattacaggcatgtgccacctgcctggctaattttttttgtacttttagtagagacagggtttcaccatgttggtcaggctggtctcaaactcctgacctcaggtgatccacccaccttggcctcccaaagtgtggggattacaggcgtgagccaccatgcctggcatcatcaacttttaaaatagaacatgaggatgctcctccagctttatacgttaatagaaatgttctgaggtaaaataagaacacagagttagaactgacaagattcctggagtcttttctctgcttctcttggctcacagacagaaaacccttccactgcaaagaactttcctttaatgtcattttaaattttgagcaaaagtaaaattagccatctatgttcttgaattcaacataatcatctgttccattcaggataaagactgaaaattacctagtattcattttgtgtgtttgaaaacctaaatagggatcaagaaccaaactggttgctaggtcatcattttcacagagttccttggcggacattccagaggatggtacatagcgactctgtccttcaaatcccgagttaccattacctgtgaaaagcaaaagcaagaaaaattactcaaattgaaaactacttaaatctgccttaaaatctttagcggcattgcccattcaagctggtaataaagaactgaaaaatcaatcattttagtaattaagaatttaataacctttgcataagacagaaaaccaaatgcagtaaactatctccattactgagagtattatcgttagcaggtagtaatagcaggttcccaagaatggggtctgggtagtcgtgagaatttggttcaaatgcttgactctcccccacccccttctctccaaggaacactgagaaacgggacgggagcatgttcactattttaacaagacaatacacagggccattacagataggactcgactgaaaaggaaagaggaacacaagatagtttctgcaagaagcgccagaactccagatctcaagtatcaaaaggaatctcatgaagttcagcttcctgctttagggcaggtgaatgattattatccccactttgcaggcaactgaggcccagacaaaaagaaacttgcccacaattccagagctgggcagtagaagtggggaaagaagtggagagagaatgacagacctatttctactgacctctgtttgaagcaattatgaacgaatggataaaaatacagactgaaatatataactgaaataactgggtttaactgtggaagaaaagcaatgtaaagaaggaaatgaaggccaagtttgtaagaagtttcatcagagctgattaagtttgatgtatatgccactgacagtccttccatggaatcagcacatcatttatggaggacaacagcaatgtaactttcaggctctcaaaaccaaaatggggaagaatgaaacacagagtaaagtttaaccttttcatccactctttcacagaacaaatacttaaatgtaagttcctgccaagggtagacatatgattttgcaatcaaattagttgcatgtaggtatgtgaaaagctatcaacattgttaaatttttggtaacagcataatagctttattgaaatacaattcacatacgacacaactcactttttttttttttgaagacagggtcttgctttgccacccagcctggagtgcagtggcatgatcacagctcaccgcagcctcgaattcctgggctcaaggaatcatcctgcctcagcctccctagtagctgggaccacaggcatgcatcatcaaacctggttaatttttgtatttttttgtaaaagtggggtctcgccatattgtccaggctggtcttgaactcctgagctcaagccatcctcctgcctcagcctcccaaactgctgggattacaggcgtgagccaccacgcccagtcttctttttttcacgcaggcatttacaagtataaatttccctctaaaccaccgctttggctgcatcctgtaagttttagtatgttttatctttcttttaattcacttcaaaatgttttctgatttcctttttgatttcttctttgacccactgattatttagaagtgtgttatttcatttctatgtatttgtgaaattcccaaatttccttgttaatttctaattttcctccattggggtcacagaacataccttttatgatttcaatcctttgaagtttat

SEQ ID NO: 5 - DNA, 171210 bp, Homo sapiens
ctgacctcaggtgatccgcccacctcggtcttccaagacgctgcgattacaggcgtgagccaccgcaccggccagaagtgcctgcatttttaaggctgaatagtcctccattgtatgaaggaactgcagtgtgctttttcattcatctgtccacgaacccttgggttgcttccacattttggctgttgtgaataatgctgctatgaatatgggtgtacacaaatctgtcttccactcctggcttctaattctttttggtaggtacccacaaatgcaactgcgggaacatctgatcattctgtttctaatttttccagtagacgccatactattttccctgttccttcacggttttacattccctccaatcatattcgagcattcctacttccctctagtctcaccaatgcttgttttttttttatcatatccatcctaatgtgtggtatcacattcttggtttgatttgtgcttccctatgatgagtgactttgaatatcattttagatgcttattggccattgctatatcttctttaggaacacgtctactcgagtcttctgaccattgttgatgggatgctttgggtttcttgttgtttagttctagctgttctttatatatgatggatatcagcctcttttcagatatatgctttgcaaatatttttcctaatccatgggttatcttttcactcagttcacagtgttttttgctgcacaaaagtgtctgtcatttagatgtaatccaaggaatctaattttcttttgttgcctatgcttttggtgtcatatcccagagaacattgcccaatctgatgtcatgaaagcatggccaatgttttcttttaggcgtatgatacttttagcacttggggtgaggtctttgatccagtttgtgttaatttttgcacctggtgtgacatagggtccaccttcattcttctgcatgtggaaatcaagtttctccaacaccatttcttgaaaaggcttcttttccaccaatgagctttcttagcactcatgtgaaaaatcatttgaacatatagatgagaagttatttctgggctccaaaacaaacaaacaacaacagacaaaagataaggatacagcatgggccaggcgctgtcgctcacgcctgtaatcccagacctctgggaggccgaggtgggcggatcacctgaggtcaggagttgaagaccagcctgaccgacagggagaaacccccgtctctactagaaatacaacattagctgggcgtgctggcgcatgcctgtaatcccagctactcgggaggtggaggcaggagaatcgcttgaacccaggaggcagaggttgcggtgagccaacattgcaccatgacactacagcctgggcaacaagagcgaaactccatctcaaaacaaaaacaaaaaaccagcatgatttcaagagcagaaagagaagagcttaaaaaccagcataatgagaaagttaggaagtttcttaccaaagcatctggaaatatgcaagcaattcttgtgaagtaaaattttcatactgtgctatgaaacactggaactcacttattccatctttctgtattttgggacccaattatccacttgtcttcattccctatcgcaccccttttcttcctagcgtctgctgatcacctttatactttccaccttcctgagattccttttgtgtgtaggtgtgtgatggagtctctttctgttacccaggttggagtacacaggcacaatcagggctcactgcaagctccacctcccaagttcaagcgcttcttgggcctcagccctctgagtagctgagactacaggcacgcgtcaccacgcccggctcattgtttgtgttttccgtagagacagggtttcaccatgttggccaagctgatctcgaactcctggactcaagtgatccgtgcgactcggcctcctagagtgctgggattacaggcctgagccacaacacctggccaaggtttccttttttcttcttacatagaagtgaggacatgaaatatttgtcattctgtgcctggcttctttcatttaatatacagacctgcaatctcatccattttgtctgcagcggagaggagtttcttcctttttcggctgaataatacttcactgggtgtgtataccacagtttcttcattgaaacaaatttctgaagagcaaatatttttaaaatgtctcagaatgtgaaacctcagggatactgtgtccattttattcttttctatttcctatcttatgtatatgcaagtgtataacaaagcagcaatcaatgtgtgtataaatctacaacttcaacaaatgtaaaatgtaaatgctaagtggtggctgggcgcagtcgctcatgcctgtaatcccagcactttgggaggcggaagcgggcggatcacctgaggtcgggagttcaagaccagcctgaccaaaatggagaaacactgtctctattaacaatataaaaaaaaaaaaaaattagccaggcatggtagcgcatgcctgtaatcccaggtacttggaaggctgagacaggagaattgctcgaatacgggaggcagaggctgcagtgagccgagaccgtgccattgaactccagcctgggcaacaagagtgaaaatctgactcaaaaaataaggaaaagaaagaaatagaaaatgcgaaatggtaagaaacaacaacataataaacatttgtatggtgttgatggacaatgcatttgaagataatatttgaagaaatcatattacaattaatttctgttcttactcattggagcttgatgcctctaaaaacttcgtcattggaaccacctctggtgctttaaaagaaaaaaaaaaaaatccacatactcacacaggtgcaaggaaatcagaatctcaggtattgagacccaggcctcatcatttgtaagctccccaggtgatttgactcaaagccaagattgaggaatggcgacatggatctctacacagaacctgcctaaatagattctctagaagcagtttataaagatattccacgtggactgtggaagaggatatgaatttgatgtacagcatgtcctcacttaacatctttgaaagtctcttggaaacttcacctttaagcaaaattatgtatagtgaaaccacttatttttcatcaacagtataactacacatctttgaacaactgatggtgttggaggacctcctgtacattgtttccataaagtcagttttcagggaattccaaaaggaagtgaggacttcgtgtatataaaaagatggttgtgattccacctggatgacagggttattgctcagaaactaaaagaggccacctaggtatagaggattctgtcatgaggtttctgctaaacaaagggtcccagaatcctcacccattccagtgaaaggcatagcgaagaaagcaatattcacaaaggaaatgtggaaaggaataaaagccatcaagccacagaaagaatgtgactaaggggcaggatttgcagatgtagagatttaatgtggttgccctttctcacccacacaagagaaaggatggaacaaatcatgagattcgactgttgtgctgtgcagcctccacagggcactttgtatgttcctgtttctcaggctgtagatgaaaaggttcagcatgggggtgaccacagcatacatcactgatgccaccacaccattcctggggggttgtgacacagctgaagtcaggtacatgccaatgcctgttccataaaatcagcaaacaacggctaggtgagagccacaggtggagaaggctttatacttcccatctgacgatgaaatccttagaatggaggggatgattttatagtaagaccataggatccctgaaatgggaagaaaaccaaacatagtactatcgaaatatatgaatatgctattgatgacgctgtcagaacaggcaagtttgagaagttgagaggggtcacagacaaaattagagatttccaaattctagacgatggtgaattgtaacacaatccaactgtgcagctgggaatccaacaggctaaggaaaaaggacaccaaaacgaagacacagaggtgaggattcacgatgactgggtagtgcagagggcgacagatggctacaaagcagtcataggccatcacagtcaggagcatgccttctatacatgcaaaaaggaccaagaaagacatctgcgtcagacagcccgcatgagacgtgactctgctatgcgactgcatgtccacaatcatcttgggaaccgtggcggaggtgaaaccgatgtcagcccagcacaggttggagaggaagaagtacctgggggtgtggaggggggagtcagagcagacagccaggatgctgagcaggttcctcagcaccgtgaccagatacatggacagggacagggacagcaaagcgaggataggctgcagttctgggtcctctgagagtcccaggaggaggaattctcagacacctgtgagattccgtggctctgtgtgtcttggacaccttgagaaggaaagaggattggaaaaatagcagataaaaaccagcccttaatgctggatgcaagcaattcacaaggaacatcttcacacttgcggaccatacaccgccagcaatgtttctcagttgtgacaattccaaaaaatctcagaattattacgtgatttacttttttgctatacaaggctttctgtacatactactttagagaaaatccactgaagaatatcagagaccaaaacgttatatataacaaatccgtgatctcagtaaaatacggcctactcttttcagaaaaaatacaatgcaatgacaatgtcctttctcttgaagaaaaagatctcagtctaattgaaagaaattaagaagccgtgaaatgcactctactttattctgaccccgtgctacaacttccattgatgtagaatatgtaaaaggacgacacaagagctaggaccccattatctgaaaacgacatcgaaccttatagttctcaatcgaaagattttcacatgcctgttacttttcatatttattatcatccttcggttttctgacatcacttcttcataaaagtacatgcacgctcaaagatgggagctgtgtttccaaatgaattgaatctataactcttggcccagcaccatggctcacacctgtaatcccagcactttgggtagccgaggctgatggatcacctgaggtcaggagttccagaccagcctggccaacgtggtgaaaccccgtctccagtgaaaataaaaaaacattagccgggtgtggtggcgggtaaccctagctactcgggaggctgaagcaggagaatcccttagaacctggaaggcagagattggaaaccctgtgataggatttttgacagcctagggagatattgcacctgacagcagagtcggcgtacaccctgtgatattatttgtaatatcctagaaagatatttctcctaatatcacagtggctgtacaccctgtgatcttaattgtaatatcctacagagatattactcccaataatacagtgggtgtacaccctgtgatattattcataatatattacagagatacgactcctgatatcacagtgagtgtacaccatgtttgtacaccctgtgatcttatttgtaacaacttagaaaaatattacagctaatatcaaaatgggtgtgcaccctgcgatgttatttgttttctactaggtagatattactcctaatatcacagtgagtgtacaccatgtgtgtgcagactgtgaaattattcataatactctaggaagatattattcctcatatcacagtgggtgtacaccgtgagtgattttttttctaatatccagcgggggagaggatgatattgcttccaatatcacggaaggtgtacaccccgttgtgatattgttcctaatatccagggaaggagaggatgacattattcccaatatcactgggggtgtaccacctccctccgggatattgttcttattgtcagtaggtggagagaatgatgttactcccaatatcacagggggtgtacaccacccctgtctgtaaacaccccctgtgatattgtaccaaatggcctgtgaaagagtcaatattactcccattatcgcaggggtgttcagacctgatgatattgttttctaacatccagggaaggagagtatgctattattcccaatatagcaggggttgtacacctttttgtgttattgggcccaatatccaggaaaatagaagatgatagtactcccaatattgaaataattgtacagcacccttgtgatattcttcctaatatccagaaaggaaaagaatgatattactcccaacagcgtaggaaatgtatacccgctctgtgatatctttccccatatccaggtggggagaggatcatattacttccaatatcgcagggtgtgtacaccccctctgtgatctcgttgctaacatccaggtttggggaggatgacatgactcccaatatctcagggggagttcaccccccatgaccttgtttgtcatttccttggtggagaggatgatattactcccaatatcgcagggggtgtacacacccctgtgaaaatcttccttatatccagagggagagaggatgatattactcccagtaccgcagggtgtttccacagccctgtgatactcttcctaatatccacagggagagaggatgatatgactcccaatatcgcagggggtgtacacccctcctgtcctattgttctgaataccctgggagggagaagataaggtgacattgaatatcacagggaatgtacaccctccccctctgatacccttcctagtatccaggggaagagaggataattgtactcccaatatcgcagaggcagtacaccccacctgtggtattgttcccaacatgcaaggggagagaggatgatactactcccaatatcgcaggggtgttcacatccccagtgacatttttcctaatatctaggggagagacaattacatgacagcaaatgtcgcagggtctgtacatcccttcttgatattgttcctaatatccaggggggaagaggatgatatcgaatatgaaagggggtatacaacccccacccctaagatactgttctcaatattcttgaggggagacgatgatatgactccaaatatcgcaagggttgttcacacccccctgtgatactctttctaatatccaggagggggagaaaataacatgacttctaatattgcaggtggtgtaaaccccacctgaaatatggcaccgaatatccaaagagagagaggatggtattcataccaatatcgaagtgtgtgtacacgccccttgtgacatggtttttaatatccagggggtgggaggatattagtcccaaagtcccagaaggtgtacactacccctgtgatattgtccctaacttccagagggaagaggatgagatcactcccgatatctcagaagttgtacatcccctgtgatactgttcgtcatatccagggaggcacaagatgacataccattgaatttcacgacaggcgtacacgcacactgtgatattgttcctaatatccaagaaggcagaggatggcattactcccaataaagcagtgggtgtacactacccctgtgttattgcctctaatatccggggccgggggagggggggagaggataacattccctcaaatgtagcaggtggtttgacgcccctcgtggtgttgttttacatatccatcgcggaagacaataatactattttgatagtccgattcatcccctccacctttccggaactctgaggccgggaggcagcaggcaatttccgtgtgatccccaattcctttgccgtcttctgtagcaagtcagccacaaacgcaggcccgttatctgagccgatccggaagggcagtcccaatctacgaatcagatctcgaagaagcacacgggttacttcacgagctttctcagttgtgttggataagcctccacccacccagagtaggtacggccaagaactagtaaatacttgttacctccacactttggcatctctgtgaagtctacctggagatcttctaagggggctgctccataagcttgtatgccgggtggaacggctggaccttgcctcgctttatgctgtcggcaggtaacacaccgctgcctcaccgttttggcaagggctgagaaacgcgagatgtagaaataccggcctaacaacttttccagtgactcctgacctcgataggtggtttcttgcacagccagtacaactgcagctcctagcagctgtggcgcagctactctccatccttcctccatcacttgtccttccctctacctggacaaagtccttttcttctttagaataagcaggtccaagatcaggtgcttgagggagcagaggagctgtgactgatgcctggaaacgggcagatgctgcttttccagcctatgagtcagcgcgggaattccccaagcccaccaaggtggaagctcgctggtgtcccctgcaatgcataactgccaccttgtggggtttccatactacttctaatacatagaagatttctggttgatattttctgtcttttaccccagagtttaataggcccttttctttctatcacgctccatgcatgtgaagggttcaaaagacataccgagaatcagtgtaaatgttgacagtctcaccctcactgagctctaaggcccaaatgaaagcaatgagttcagctttctgggctgaagtggcctggggcaacgatctggcttcaacaacagtgtccagggttatcactgcataccctgcacctctctctccttgggggttgaagaagctgctcccatccacgtatagttcccagtctactgatgcccaaggctggtcccagaagtcaggtctgctagagtcaactgagtccaacacttctacacaatcatgctcgacggggctctctgatagcgggagcaaggtggcagggtgttacaaacttcaatggttacacggggattttcacagagcaaactttggtacttggtgagtctggcattcattagccaatgatgtcctttaatattcattaaagtcaccacagcatggggggcctttctgttcaggttctgcccaagagtcagcttctttgcttcttgtactagcagggcagttgctgccaaggccctccaacacaggggccatcctttagagaccccatctagttgtttagagaggtaggccaccggcctcggccaaggccccacagtttgggttcaaagtccggctgccatcttttctctctctctgacacataggatgtaaaagactttgtcagatcaggtagccccagggctggggctgacataagtttctcctttaactcacgaaaggcttgctgttgttgggatccccattcaaaaatttcccatccccgccccctttgtgaccttatacaaagtcttggctaatactgcaaagtttgggatccgcagtctacaaaaccccacagctcctaagaattctctcacctgccttctgctcttaggctctgctagattgcaaatgaccggctttctttctgatcccgggctgcgttccccctgtcggatactaaatcccaaggaacatacctgctgtcagcagatctgagcttttttcttggacaccttacacccacagtcctccaggtgtcggcgtagggcaatctgttcccttggtgcacccgactgccatgaggtgtcccagcaaaagctcatcaacctactggagcaatgcgcagcctaggtctctggtgggaaacttctggaggtctcaagccaacgcctccccaaagatggtgggggagttcttgaacccttggggaagcccggtccaagtgtactgagtagtgacacctgactccggatcttcccactgaaaggcaaacagcttctgcctctcaggggctaatctgatagaaaagaaagcgtctctcaggtccaagcaggtgaaccagctgtcctcagctggcagcaaccccaacaacatggacgggctaggtactgttggatgtaaagtcagggtagcttgactaaacaagcgcaaatcctgtcccagcctgtaatccttggtccatggcttgggaacaggcaggaggggagtgttctgtggagactgacaaggaactatcataccaaaagttcttaggtgcttaagatggacctggataccttgaagagcttctctggggaccaggtcctgtttttgcctaagtggctgggccccagtcttaactagccaaccctggagggttgtcttctgcccgtactcttggcctctgcttagccagagctggtcttctctcttggcccggttcagttcacaaaagtctccattcctcctctcgggggaccataaggtcataatgactcccgtggcgggtaactttagcagcaaagagctgtgttctgtcaaagagagagcagctctcagcttgctaagcaagtcccttcccaacaagggcaagggacagtcaggcatgtacaaaaactgatgaatcacttgatgtcctcctacagtgcaagtcccaggcaagcagaaagcttgctttgctgaaacccccatggctccggtgatgtcaagggtctttctggataacgggcgaccggagcggttactagcgaatgttcagcaccgctatccacaagaaagtcaatgtctctacccccgactctcattctaaccagaggctctttggagacacttgagcctggtctccctcagtccaataatccttttgccaggttgagccgggccccttcctccttgtccggggcctcctgctctgagtcaccttgttttcttttgagctcagggcatttgttcttccaatgtcttatttctttacaataagcactctggttacgctgcaaactctgacagccaagctgagtttctttcccagggctccccttcccttgcttctttggggggacagctctgattgctgcagctaacaaacaggtcggcgttttgccgggcctgatctccattctctttgcgctttccctcgtggcttactgtatccctgtttacaaacacctgcttagctatttctcatcaatgtgatgtattcctccctgcaagcccagcctgcttctgcagttttcttctaacgtcttccgcactttgacggactaaagccatttgaatcatgcgctgattttcagggttatcgggatcaaggggagtatacataccataggcctcacacagtctctggtagaattgtgctggactttcttcttttccctgaatgacttcagagaccttattaatatttgtggccttctgagctcccctcttgaatccttccaagagagcttccctgtctcggtttagcctttgcatatcctctctttcatgtgggtccaactgggggtgggttcctggtaactaggtccttccatactcttgggggttttgataatcagctggtgcatgttcctctagccacttagttgctgcgtggagccctctccgcctttcgcctttcacctctcttaaagaggaacatgagcaaccggtggcgatcagcccaggtggggttgtgggtctggataacagtttggagcaaatctattagggcttgcggcttttcgctctaggacggggtattgttttcccagttgagaaggtcggcagaggtgaagggcttttacacaaaaacacgcctctccaccacgtgaccatcctcctctctcccagtataccgctgctctctcaggggcatttggatccccgttttgggtcgtaaacgagctgccaagggaggggtggaatggcgcaatgttacttaccgcaattaataatatcaattattaattgatactgataattatcaatattaataactgatcatataattcttaaaatcaatacctataataatgataattcatattaaagagctatactcacaataacaacaaatgatgaatgttaatgattaatgacgcctggtcttagtgatattgatcttattcattagaaaactgtcatattaactcctaataattaacattaattttaataatctgaacacttttttagcaatgatttcttaatattaatattagtaatacatattcatgttaataataaatgaggaagaattaatacgaatattatccctaatacctcagtgggtgtacacccacctgtgatattgttcctaatgtccagggagggagagagcatgatatgactttcaatatcgcagtaggagtacacccacccggtgatatttatccgaatatcatctccagggggtggcgtatgacgttactcccaagatagcagtgggtgtgcatccacccggtgatattcctcctaatattcccggaagaagagaatgctattactcccagtatctcaggaagtgtacaccccttctgtgacattgttcctaatatccggaggggagagggtgatattactcgcaatatcgcaggctgtgtacacccaccctctgatattgttcctagcagccaggaagtgagaggacgatatgactccccatacagcaggaggcgtacacccatcctgggatattattcctaatatccacggagaggagaggctgatatgactcccagtatcgcagggggtgtacatcctgtctgtgatattgttcttaatattcaaaggtggagaggttgatattactcccaatatcacagaaagtgtacaaacccgtgtactattgttgctattatccagaagaagagaagatgatatcacccccccatcgcaggaggtgcacacccactctgtgatattttttccaatgtgcagggcaggggaggataatactcttcttcatagcacacggtgtgtacagccccgctgtaatatggtccttaatattccaagcggagaggatgatcttactcccaatactgcagaaagtgtacacgaccccagtgatatggtgcccatgatccaggacagaagaggatgatgttactttcaatatcgcacagggtggacacgcccccagtgatattgttcctaatttcaacgtgggagaggatgatactacacggaatgcccctggggtaaaaacactcctgtgatattgttcttaatatcaaggggaaagaggatgctattactccaaagagcgcagaggatgtgcacccgtctgtgacatagttagtaatttccagaggcggagaagatattactgacaataacgtgaacacactgtgtgaccaccgtggatcgtcatatccgggggggagaggggggtgatatgactccccgcatcgcggggggcgcccgcccccctgcgatgtggatcgtcatatccaggcggggaggggggggtgatgtgactccccgcatcgcggggggcgcccgccccgctgcgaagtgaatcgtcatatccagaggggggtgatatgactccccgcatcacgggggcctcacccccttgcgatgggggtcctaagagccagcgggggataggggctggctcttactccccgtaccccgggtggggggcctcacccccctgcgatgggtctcctaagagccgggggagagagtggctggctcttactccccgtatcccaggaggtgtgtacaacccctgcgatattgggagtaatatcatcctctccccctgaatataagaaacaatatcacaggaggatgtacaccccctgcgatattggaagtaacatcattttctccccctccggatattcggaacagtatcacagtgggtgtgtacagctcctgcgacattgccgctagtatcttcctctccctcccaggatagaaggaagaatgttacaagggggtgtacaccccctgcgatattggctataatatcttcctctcccccgctgccttttaggagcaatgtcacacaaggggtgtacacccgcggctatattgggagtgatatcatcctctccgtccctggatattaggaacaatatccctagggagtgtacacatcctgcaatattcagactaatatcatcctctcgccgcctggatattaggatcaatatcacaagggtggtgtgcacccccggcgaaattggaagaaatatcatcatctccacctttggatgttagggacagtatctcgggggaggtctccgccccctgcgatattgggagtcatatcatccgctcccacccaggatattaggaacaagatgaccgaagggatgtacgcccactgcgctattttcaataatgtcatcctctaccccctggctattaggagtcacatcatagaggggtgtacactttctgcgatattgggagtaatatcctccccccacggatatcgggaacagttctattgattattaatattacaaatataataacaattaatagtaatcatcaatattaataattactgtagagacagtaaaacagtacggatgaaaaatattaacggttactatttataattaatagcaatttcagtattaataataaaataatgatatcactaattaatgttacttcaatcataagtgatgttggtaataaaacaataattaatattaagattaataactaatattaaaagtgacattaatattaataattaattttaatcatgcataatcatatctcaaaaataatcattaatgattaataacgttatactgttaattaatattaccattgataattattaataagactgatgtttaataattcagaatattattactgctaataccgcagggggtgtacatctacttgtgataatgttcctaatatccagggatggagagcatgatattagttttcatatcacagtaggtgtacactcaccctgtgacaccgatcctaatacccagcttgtagagtatgacatgactgccaacatagcaatcaatgtacagccacccggtgatattgctcctaatattcacggaagaagcgtatgatattactcccaatatcgcagggagtgtacacctcttctgtgatattgttcctagtatcccgagggggagagggtgataataattccagcaacgcaggctgtgttcacccagcctgtgaaattgttattaatatcctgaaagggagaggatgatattactccccataatagagcaggaggtgtacacccaccctgtgatattcttcctaatattcagaggccgagaggttgatattactcccaatatcgcaggaagtatacacccctgtgtgagatggtccttcataatattccaaggcggagggggtgatatgactacatatatggcagaaagtgaacaccccccagggatattgttcccatgatcctggagggaagaggatgatattactttcaatatcacagaaggtggacacgcccccactgatattgtttctaattgcaacgtgggacaggaggatatgacacgcgatatccgagggagtggaaacacccctgtgatactcttcttaatattcatggaggaagaggatgatattactcccaatacagaaaggtgtacaccctctgtacactgagggtatacacccatctgtgaaacagttcataatctccagagggggagatggtgttgctcaaaataaggtaaacaggctgtgagtccaccgcggatcctaaaacccagggggggaagaggggctagctcttactccccgcatcgcagggggtgcctcacccccctgtgatgggggtcctaagagccagggggggagaggggctgttccctacgttggggcactgaggtccctgttttcttgtaagctgccattggggaccactctcggcttccaggggcccccttgtaggtggcaccatggccacttgccctactccaagcctgcagaagagcgcctctctgccatgtccctttcttttaaaagacttgcctgactggttcaggtccattaggtagcgtcccatttgattagctcaaaagtactgtagcccatcacattcactcacaggagggcattagcggggtgtggacaccagggagtgagaatctctcaggccagtttagcattcagttggttagccaggttcagtggctcacgcctgtaatcccagcactttgggaggccaaggcgggcagatcacctgaggccaggagttcgagaccagcctggccaacatggtgaaacccagtctctactaaaaatacaaaaattagccaggcgtggtggtaggcgcctgtaatctcagctacttggaagcctgaggcaggagaatcgcttgaacctgggaggtggaggttgcagtgagccgagattgtgcctttgcactccagcctaggcgatacagcgagtctcaaaaataaataaatgcgaaggctgctgagcacagtggctcatgctttataatcctggcactttgggaggccgaggcaggaagactgcttgaggccaggagtttcagcctagcatggacaacacagtgccactctatctctaagtaaaataaaataaaataaaataaaataaaataaaataaaataaaataaaataaaataaaatagtaaaataagaattcagttggttaaaagaaactcactaggtccagcccacaatcaagggatggaaattacacaaagttgtgaagagtcaagggtgggagatcgctggcagcccttatagatgctgcctatctcacatacctgttggacagcttctctctcctagctgggggtatttggagcgggtgtcgaatcctgctcttttttatgtctgttgccttttctcgcggtgatgtgtttcctgtgtgttctgtaattttggatcgtgagctgagcttcagaggggctttagtggtcccagggtaccactaagccaaggcaacttttatttttgagacagagtttccctcttgttgcccaggctggagtgcagtggcgcagtctcagctcactgcaacctctgcctcccaggttcaagctattctcctgcctcagcctccagagtagctgggattacaggcacacgaggcttggctaattttttgtatttttagtggagacggggtttcaccatgttggccaggctggtctcgaactcctgacctcaggtgattcacctgcctcagcctcctgaagtgctgggattacaggcgtgagccaccactcccggcccaaagcaactttttagtgttaatttctcaactctggcattcctagaccacacaggtggcatgactttattgtaggagttccacatttacataagagaggcctgaaaacgcaacgatctcatgggaaacttgttcaccacctaaagctcaaaatttctcacctctctctgttcccctgggtggaaatgtttctgtccctttctctaaaggtgttgcatttctgtggccccaacttcatcatgcttgactgtaaccctaaccccctgccttgtaagggataccaacgctcaacccagccctgccctcaggcagttgcagcaccagctcctctgtccccaccttggttctcactctcctcttcacttctggccttaggggacttaacttattttctgaagaactcagctatatatttattttattttatttatatattttttgagatggagtttcactcttttgcccaggctagagtgtaatggcgtgatcttggctcactgcaacttctgccttccgggtttaagcgattctcctgcttcagcctcctaagtagctgagattacaagcgcctgccaccactcctggctgatttttgtatttttagtagagatggggtttcaccattggccaggctggtcttgaactcctggcctcaggtgatccgcctgcctcagcctcccaaagtgctggaattacaggcgtgagccaccacgcccggcctcagctctatagttaaaaggacatttgtttcttacccagcatttctaggtgttttgaagagggagacttctcaggttatctaacctgctactgagaacttaaagatagggaaaatcttggactggagattcttggaatcacataattgaaaaatcccagctgggcgtgatggctcacgtctataatcccagcactttgggatgccgaggcaggtggatcacctgaggtcaggagtttgagaccaggttggccaacatggtgaaacttcgtctctactaaaaatacaaaaaaaaaattgcctggcttggtggtgggcgcctgtaatccccgctactcgggaagctgaggtaggagaatcgctggaacccaggagatggaggttgcagtgagctgagatcatgccattgcactccagcctgggcaacaagagtgaaactccgttgcaaaaaaaaaaaaaaaaagaaaagaaaagaaaagagaaagaaaaagaaaaatccccacagtgcagatcgacaaaatcacagagttgctttgggagcgagggtggcaatcagacacggaggccatgacacaacctgcttatccactcaggggtccagaacctccacccagtcaccttatccgggggtgatggagacaggggaggtgccacctacgccagtgtcatctcttacaatgagctcttctcctgctcgaaaagagccagcctgctgagcttgctgccagggcccgtcgcactgcctgcgctgtgttgcccgtcgcacagcctgtgatatgtgtttcccatcatgtgtgcatgtgtgttgtcatgtagtgtctgtcacaggtgttacccgtcacgtgtgtttgcatgttgcatgtgtgtggcctatcaggtgtaaatatgtgttgtctggcacatgtcagcatctgggcattctccgtgtgccaggagcagccaggtggcctgtgaagccttctcatgggaaatgcccagataggaagagcacagccaggagccaagcccctgagtggccactccatgtgcctggatcaccttcaagtctgctcaacatcacagcctctgttccttggcaccatggacattggaattgactcggaactgggaagagctgtaggcccactatccaggcacctgctccccgtttgcccagcatcccaggggcccacacccttccaaatatcaccttgccctccattcagaggtgaatcatctgagcgtcaggttgcccaactccgactggttttgctggagcctgcctagaggatgtcgccagccacctccagagaacactcagtctacagatgccgagggggaactggaagcacacagtgctggccttcacccaggttatggtggcacctcgggaccgcttctgagtctgcttgtcactgaaggtcggcgtgaggcaggcagcgttccctcccagatttagaaaatgtcaagtctcccgccgcacccttttgtgtttcttacagggcctggtgcgcttgctgccgccacactaagggctccaacatgttccctcacacactcaacagagaaggaacctgtggctcagatggcagactccctgtccaaggccacagagtctggccccagggaccactagaggcttcaagaaccaaactcacatgagggcagagaggagagatggggccagtttagggctgggagaatccatagagcgatgctgaggcaggcatggagcctggaggtacggacgagggtctcgccaaagtcaggggtaaagaggctgtggggagtgaggaatggtgtgggccagccccgggcctgctggggtgcagctgggggctccatggccctcccacggcccccacttgtcctcacccaaccgttcagagctcttcatggcgggggtgtcctctcctctggccacaagaggagcgggtggaggaacggcaccttcaggccttgtagggggtctgcccctccaccagcctgtttctcgtgggcatcgcagctgaggctgtagccgggaaagggtagtcaccgagcgtacctggcctccaaccaccacttccaaggcccctactgggcacagggtgaccccaccgtggctcggaagtggaccctgtccgacgcgggggtggtcgctggagggcggaggatgcctacacaggcctctggagggtgtgtctcgggagtctgtctcgccctctggacccatgggggaccagcaacgccgtcacaccctcctctgtctctgccagccgctccgccgctcccttctcctggctggggctggcaaaggcaggcaggtatgggggggcggggcctcaggagggaggaagggctggtgggcggggcctacggacacctcgccccgcccccagtagggcgcggcactccccacaccacgcggtccccctaggtcagggcctgtcaccactgcgcccagaggccgggccagccgtgcgtgcatcccagggcatccgtgcatccgtcccccgcggcctgggactccccagtcaggacagtacaaaatctctttattgctcattttctgtaaaaaatcgtggctctcggcggaccctggggataggaggtgcaaagtgcgctcacacgcggcccgggtccgcggccgagagctgtggggatctggagcgggccgggtcgcaagaagaccctgaccgtgctccggcgctggggcgcgtgctaagggcccgcggggtttcagctgtattttcgaacccctgtgcttggccgaggggttcccaaggctccactccgccttggagggggctgcggaagcccggaggtgacctgggctctgggaggggcgtccccaacgtgggggaggggagacaggggcctttgaagacagcgcgggactcggagggggtccccccgacctcagacgtggtaaactgaggccggcgaggagggaggctgagtccggggaccaggcggcccctcactgctcctccggcccgtctcccccctgcgcctgttcgtacgggcagggccggcggccgagtccagcgggctcggggccaggcctgggccctgcgggcggcgcctcctcctccgcgccgtccccatgctcgccctccgcgtcgctctcgtccgagttgtcctcctccaagtagcggtaaccgcgcaccttgtgctggggccgcgggatgcggggctggcgcggggccacgccccggcgcagcttctgctccatccgcaggtaggagaccgcggccgccaccagcgtcaccagcagcaccgccagcttagcctgggcgtaaggagagggatgccagggacccgcggccgcctcgccccgcaccttccccgcctatgcccctcgctgagataggcccttccctcctccgggagcctcccgggccacgcggccctcaacttctccagcccctccacccatgcttcctggaccgcctcctgcaggcgaggctcacatccagcactgtcccttacagtcgccacgcccctggcgacctcagtgtcccacactgtaaggggacaatgcaaatccctttgcctcatagggtgcatgcgccagtgttgataaagtgctggccacaggccctgccttcccagggctcacaacactgtgtccctgacacacccgtgggctgtagtgatgcttttcatggggttttgactataacccgcagtcaggaatgatttcacaccatagcccagtacatacacacatatctgtatgcatacttcctgctcttttcttttttccagacacggtcgctccgtttccccaccgcgccccctccctcccttcccccacccactgctggagcgcagtggcacgctcacttcagcctcaatcttccaggctcaagccatcctcccacttcagtctcccaagtagctggaactacaggcacacgccactacgcccagctattttttaaattttttgtagagacagggtctcctatgttgcccaggctggtcttgaactcctggcctcaagcaatcctcctgcctcagcctcccaaagtgttgggattacaggcgtgagccaccatgcccagcccactcactgcttttcttttttttttttccttttttttttttttggaagacagagtctcgctctgtcctccaggctgaagtgcggtggcgcgatcttggctcactgcaacctccatctcccaggttcaagccattcttgtgcctcagcctccagagtagctgggatcacagggacgtgccaccatgcccagctaatttttgtgtttttagtagagacagagtttcacagcctgttacccaggctggtctcgaactccagatctcagaacccccacctcagcgtctcaaaatgctgggattacaggcgtgagccactactgccagcccactccctgctatttttagttctatttttatttttattttgagacggagtttcgctcttgttgcttaggctggatggagtgccaacgccccgtctcggctaactgcaacctccgcctcccagttcaagtgattctcctgcctcagcctcctgagtagctgtgattacaggcacctgccaccacgcccggctaatttttgtatttttagtagagacgaggtttcaccatgtcggtcaggctggtctcaaactccctacctcaggcaatccactcgcctcggcctcccaaagtgctgggattacaggcgtgagccaccgcgcccggcctttagttctatttttaaaaaatgtttagcaactgggacttgctagaccgagccaccattttttgtgagcagagcatgaggagcctgctccccttcaggccatgaagagagacagacccaacatctggagaacaaggtaccaaacagcccacaggatggctgtgatgcacccacaaatcccctcagagatgggcaaactgagactggctggaggtgggccagtaagtggggtgctgagttgggggccacccagtgggctgcaggaatggggccttggcccagagactggcttgggaaggggtggcatttaggaagctgtgaagccagggcaggggctaaggaagtacctgtcattgggcatggggcccccaaccctgcccagtctcaccttcatgtgcaggctcgagcccaggtacacggtgaagatggccacagcctgccaccagtggtagatggtgaagatgaagtcctgtctctccttgtcttcgtacaagattcccaggagtgctgcaggcaggcagtacagggcaggcaggggagaggtgtcacctggggcctggggctaccgagctaccatctacgaactttactaagccctgtatgggtcccagccccggaccagagagcgcctagaaagtgctgtgaggcggtcctggcctgccccctggtggagaccctggtcaccacactgctcacacgctaagcagaagtaggagcaggtgcctcgggctgtgtggatgcaggtgttcccgctccgcaccacatgcgtggcctcaaaagaagaaagctctgtgcttagtcatgtcctgtccccaacccaggtgtgcagtgccaagcttgcaggcgctgtttctcctcctcagccaggactagagagatcgaactgtttgcagctgccaactctgcaaatcaaacctgaagctaagcatggagaggggggattcctttccagtgagtcctcccagggtgggcaacaagagtaatggattgggagtcagaagatgcacgctcgttctcagggctgtaatgttggctctgtgggtgatttgggtacttaactccccagagctgcttttcccaatggtgagatgagcttatgcctattgtgtgctgtgttctgaagttctaaagtgagaaagtgggcatggcacctgccaaatcataggggccactattaacaccttcaccaggcactcaggatatgaacactcctgttttggggccctgcagggtgactttacccccacagtgctgctatgaagagacaaggaccccccggggttcaccggaggagatgggatatggagctgggcagaggggatgccaggaccagacagggcacaacatgggttcaagatacccaggctggactctgcccagaattggctatccttgggcaaaacggccaagagactgtggtgcagtatgaggctccagcccctgctacagacagagacacagagccagcctccgccctgccagcagcaggcatgacctcggctactccacacccccaaggatgacgttcaaaactgttcacagcttcggcccatcagaacagacactgacatggatgcccggcaggactgcccatgtgtgctagctgtgtttcactgcgtgtgcccatctgtggtcagggagcatcctggagctgaacatgggcccacccgctgccttctgcaaacagggccctgttccccagcagcccagacctggggcctggactctggtactgagcagactgggttggggctgcaggcctgctcctctctatacaaaggcccatgtctgtatctatgccatgggtgtacaacaggccacttgctcctaccacatgctccgtgaagcagagaccaaaacatctgctccaagtgtcatgaaaactatgccagggtaagccctgtcccctggtatgaaaagggagaatccctgatgtgtttttcacactgtccctaaggggtgtccacagagccccacacctgccccatgtagccacgagacttcacactgaccctccagtgttgatggggccctgtgcccgctctggggtattaacagaatgtccatggcatggaacccccatacctgtctccagggtgtccacaccctacccatctgtccccagtgtgtccataagacttcccttccacccccggagtgtccacaggaagccccacctgcctctgccatgtccacaggaccctatgtgaccatgggaccccatatctgtccctgggatgtctatgtctcgccaaccacccacagatagccataaagccccctgccccgcccccccccccccagtgcccacagctatactcactgctgagtccagtcttgttcagggcactgcccacaccccaaagggcagctgccacatagaggatccagctgtgttgcaggacccgaggcacaggggcccagaaaaagaggatgaaggtgagcagcaggtgcacccctgctccggccaccaggggcaccgggcgtggcagccacaggcccagcaggcccaggagtgaggcggctgaggcgcccaggctgtaagccacgaggaggtaagccagccgctccagccccaccgagcacacgccatagccctgcggggggacaaggggtgagtgttgaagtctggaacagcccagaccacagtctcagccctccccgcatcgcgggggtgcctcacccccctgcgatgggggtcctaagagccaggggggaagagggtctggctcttactccccgcatcgtggggggtgcctcacccccctgcgatgggggtcctaagagtcggggggaaaagaggggttggctcttactccccgcatcgcgggggggtgccttacccccctgcgatgggggtcctaagagccagggtggggagaggggccccccgcgatacggggagtaagagccaggtggggagaagggctggctcttactccccacaagaggtgttccttaggccacaccctgccctccctggactgcctgacctcgctccaaggctcaggggaaggttctgagggcaggtgtgaaaatgcttggaatgtccctagacaccgtgggctgtaccccacaaggaactaaacactctgtgggtgctatcccatttcgattcagagaagttaaaataacttgcccaaggtaaaggggggacgggggtaagagagggaagagaaagcaggagggggatatttgggatatacatgtacacacttacatatgtaattaaaaattattctttgtttacttgaattcaaatttacctggctatcttgtcttttgtcgggcaatcctttgcaggctgtacttaccaaggcgataccagtgcaggcaaagagcacctcgaagccgctgtagataaagaaaggcacgaggtggcgcaggcggtagtcacgcacgtgcttgaagggcagctggaagatgttgccccagcccacgctgcgcagatcgatctcctccgtgggccggtaagcggctccgcacaaacccagcacctgcgaacccattacttgaaggggcggccagccaggcccaggcctggcctccaggcttcagccccgcccttcagatgcaccacgtgcctgggccttgccccagctcggccccgcctcccaaaccagggccccgcccctgagacactcccacagacccaggtcttgccttatcccagctcaaggccccgcctctcagcacaaagccacgccaccacactccgaaagacggtggtcttgcctcccagcccaaggccccatcccctctctctcacatacacacacttcacaactcacattcagacaaatccatagacttcaaccttccttctcagccccgcgccagacctcagccccgccttccaggctagtccccgcccctcggacacacccacagacttcggccccgcgtcccagcactaggccccgcctgacacagccacggactgggccttgcctcccagctccatcgccaggctgcagcatgccaacgccttagttctgccgtccagtatcacttccagtttgagccacaccttccagccctcacccttggtcctgtccccaaccccctcacaggtctcagtcagtcttctaagatcttgtctccagctcgaaactgtggaccaagcctgttccctccttcccctggcctctggatgcccacgcctgcctcggaccacaggcctcagccccgcctccgagcctcatgcccgctctgcagcactcggccctagctccccaactcagatcgcgctcccaggcctacggcctgccccgaggccacaacccgacccaggccatgccatccgatccagaccctttctcgcagactcggtccccagaaccacactctgcttcactgactgtcctgcccccatcccgggccgcaccagcagcatggccaggaagccactgccatgagcacgctctccaccacaatgaggtttccgctccgcgggagcgtccgcagaaccgtcttgttgaagccgctgaggatcccgtggctgttggtgcctgggaagggtgggggtgagggcaccgtgagcagagagtagggcacacagtcaatccagccaccagggtggagccacgcaggccgcggaggagcggtggagggcgggagagtgagagcaagggcagagttccttcagagagcagtttggaggtttggaccactggggctgggtttggaccactggggctgggtgttccccgggaaaggggcatctttcccctgcttcccaccctatttccccaaggctcagtggacctcacatttccatgcacaccccctgcactgattgagctctgactgtttgcctggccccaagaaagatcccactggcagcctcagcccagatggtgccttctccaggcagtcttccccgcccacccactctcctggctgggtcagatgtcctaactacttactcctacagggccctgtgtcttgcccaccagagccgtggggcactgggctgccagccctgaatcctgtgagtgagggcccagtgtctgctggggaagtaagcaggctttgtggactcctccccaacccccaacaaggactaaccgcagctctgcacattgtacagcgtgtggttcaggtcatacaggtagtggttcaggaaataaatcatgggcagctgggcgcaggcgaagctcagctgcagaaacaagggcagttgggaccagactcaggcacagagccaggcaagggacacaggcatggtctggggaggggtccaggcacagccttgggggaacaggggccttcccagttctgggagtagtgtggttacagggccgcccaatgaggaagacctcctcctggccagcattgtggaaaagggcagatgagatctctatctctatggatgagcaagctggggtgggctcaagaaaggaagatgggcagcctgggcaacatagtaagatcctatctctacaaaaaataaaaaattagctgggtgtggtagcacacgcatatgatgccagctactcagaaggctgaggtaggaggatcacttgagcccagcagttcaaggttgcagtgagctgtgactgcactactgcactccagcctgggcaacagtgcaagaccctgcccccaacccccaccaaaaaaaaaagaaagaaagaaaaagaaatgaaggtggggcagatacagtggtgtgcgcatgtagtcccagctacttgggaggccaaggtgggaggatcactggagcccaggagttcaaagccatctgggcaacatagtgagaccaggcctcttaaaaataacaataataaaagaaagaaagtgggactagagggttgagactgtggatgggctccaatgcgtgggtctgcccctgccacccaacaatggcccacgtggcactcacatggaagaagctgtagaagatggcttggaagaccaggagatagggcgcgtgggagccccgcggaggccgctgcttcatcccctgcccatcctgctccttgtagtgggagtactcatggtacttctgcgccatcctggaccacaaaggagagaaggctctccccagcccgacctgtgccactcctgtgtgtcctgcacccagagctaggagcagaccagccccggtgtggggaaactgaggcccagagggcggaaggggcttcctgtggtcccccagccaaagttggcaataaagtggaggcttggccaggtctccagcctcctgccctgctgcccaccaggctcacctggtgatgtagttgcccatggaagcccaaagaggcacgatggccatgcccagggccacagccgagggcacaagcgtgtagtagcgctcccagtagttggtggagacaaagagggcgtagatgcccacagcgaggaacatcatccacttcgttccaaaaaacctgcggacagtgggagagatgctggcaccacaggcctgctggaccactgtggcctgaagccaaacggggccacaaccgcaggtcccagctcacagggctttgtgaggtagagagagtcgagggcactgagatggaatatcagatacacagacttgctgagtggcctcaggcaagctactgtgcctcagttttcccagctgtaatatgggcacggagcccaaaccacaggcctctcatcaccactgtgaggatggagagtgacccatgggtgtaaccagccctcatgcgtgttctgggctctctgattctcccattcccccttctcctcccaagctcatgcactgtgtctgtagggcccaggggcttgactcaggctgggagaagagaaaggaagaggccccactgctgggagcagcagagccagagtcccggcacccctgcctccagtccattgcttttatgaaccatggtggtcagtcaggaagtttccacctctctgggtctgggaaaaggtcacacagtgacaatagaaggggcttggtgagtgacaggatgagggctcaaccacccatggaggctgatcaggccaaaaaccactactggtatcttcaagttttctgtatttatgctccttaagtaaaaatgccagtaaaaatgtgcattcactgctggtgaggatgtggtttgaaagtggcacatataggccaggcacagtggctcacatctgtaattccagcactttaggaggtggaggtgggcagatcacctgaggtcagaagtttgagaccagcctggccaacatggtgaaaccccacctctactaaaaatacaaaaattagccgggtgtggtggtgcacacctgtaatcccatctacttgggaggctgaggcaggagaatcgcttgaacccaggaggtggaggttgccgtgagctgagatcgcgtcaccgcactccagcctgggcaacagcaagattgctcaaaaaaaaagtggcacatatagccagtggtcacacacactggcataaccctttgggaaagcagcctggtagttttggcagggggtgaacatgtggatttgagtccctctactggggttcaagccttcagtctgccagttactgcctgtgggacctgggcaagttgtttaacaccatggtttcttcatgtctaagactggagcagcttcctcaaattattgggaatgaaattgcgcttataaagtgcccagcacggccgggcgtggtggctcgtgcctgtaatcccagcactttaggaggtggaggtgggcagatcacctgaggtcagaagtttgagaccagcctggccaacatggtgaaaccccgtctttactaaaaatacaaaaaattagctgagcgtggtggcgggcgcctgtaatcccagctactcaggaggctgaggcaggaaaatcgcttgaacctgggaggcagaggttggagtgagccgagattgtgccattgcactccagcctggtgatagagtgagactccatttcaaaaaaaaagtaaaaataaaaataaataaataaaatagagtgtcgggcagacaggagacaagagttcactgctattagtagaagtgataggtttcaaaagccataaagccttttgtatggcttggacctagtaaagacattgttgaaaatgtatcctaggaaaaataattgtttaaaaaattgggggagtgctggatgtggtggctcacacctgtaatcccaacactttgtggggctggggcgggtgaatttgagactggcctgagcaacatagcaactccccatcgctacaaatactttaaaaatcagccagatgtgatggcgtgcgcctgtaggcccagctactcgggaggctgaggtgggaggattgcttgagcccagtgtgtgggggttgaggaggcagtgagctgtgttcgtgccactgcactctaacctgggtgacagagtgagactctgtctcaaataataataataataaaataaataaacacataatttaaaaaaaaaaaacaaggaaacagatgtaagcacagaaggaactgcagtgtccaattccaagccactgttcagtgccaccgtatctgcagaagatgctaccattgcaaagtcgtaactgtgaaggctgtagagtaggctaagatatgctcagtgaaaagaaggaagcaagctctgggcactgtggctcatgcctgtaatcccagcactttgggaggccaaggcaggagaatcacttgaggtcaggagtttaagaccagcctggtcaacatagtgaaaccccatctctactaaaagtacaaaaattaaccgggtggcaggcgcctgtaatcccagctactcagggtgctgaagtaggagaatcgcttgagcctgggaggcagaggttgcagtgagccgagatcacaccactgcactgcagtctaggtgacagagcaagtatctgtctcaaaaaaaaaaaagtaagcaagcaaaagcaaacatagcccgcttgcatacacacacacacacacacacacacacacacacacacgggcacgtccacacacgtgctctggggacaaggatgtgaatgtaatccatgcatgctggtgggacagcatgggtagccgatttcctggagggcttagatggggtttcttttttatgatttcagttattctaatcctgcctgtgcaacgggagatgttttaaattttcaaatttttgtttaaatggagttttctcttgttgttttgtttgtttgtttgttttaaagatgagggagctcaaattcacctaatttgtccactggtctccaggtcccatcagggagggcactgtggaccggtgatggggaggctgaaccacatacctccagggctcagatctgggggagagctctggggcacctgcccagccatgcctgtctgtgagaaacaccccctcagcaccagtcacagcgactgggccaggcatgggtgcctggactttgctgaccgatcagaaacccctaactctacagccccaaccctgaaggccacagtggctctgggaggcctccaaggaggccacgaggagggtgccacgtgaggcccaggcaagctgggagggagctcagcccgtgtgaatctgttgctggaaaccaaatgtgccctgaggcaaagttcctgtttccttccccaaatccgagtttcacccccttcactctcaggcttccgggtagaaaaaaacctctcccttgttccctcgccccacaaacaccccggcagatggacacctcctggcccgccggcctctgtacccctccgaaatgggagtaccgcagcatcccacaggagcagccgcgcccacctgatgagcacaggtgtgtagagcagggcggcgatgggagtcacgttgatgcccatcagcattttgctgtcgatgtcgggcagccccatgttgccatacttcacctcgcggtaggtctcgtcgtagtgcaggatcagctgcatctgcaggaggcctggggacaggacagagagcggcgtgcagggagcagcctagctttgggcgccaccgagcagaagacggcatgcaggcctcgcagggagctccaatcaccgaaggcattcccgctgacagcgcccctcaggacagcggggttcccgggctgcgccacgccttctgccagcccgcggccacttggccagctaagcccagacccccacccgccttgctccgccggcctccaattctgacggtggcaggtctgtccgggagcccggacccccgtcccccacccacaccgaggctctggctgggacccggggacgctgcgctacttgaccccccaaccccacccccgccgcggggggccgtggctgcagctgcgagggcagcggaggggaagtgagagcgggcgggaggcggcggcccgcggtttctgtttcccgggccgggctgggagcgggcggggcggccccgggtccccgagcggcacctacccaggtagacgccgtaggtgagcatgcccccggcgctggcagccagcacgttcttgagcacgcccaggcgcttgcggcggtagtagcggcgctcctcctcctcctcgttgtagttggggtacgcgcccaccagctcgtccagctgcgagccacgcacgccgctcgcacccgcgatcgcgccccgaacccgtgtcccccggtgcccgccgccccccggcccgccccgcccccgccggggggaccctggcccacaggggacgcccgcgcctcgcactccgggtccccgctcaccggggcctcgggcccgtccgggaccccgagcaggtcctcgtcgccctgcggccccgcagcccccgccatcgggtagagcggcggctccgcctccatggcccgaactactgcggactcgcggcggtcgccccggagtccctgcgaccgcccggccacttcctcccggcggccgggacctgcccccgccccgccctgtcccgccctgcgggccgcctcctccaggacacgtgtgtgtgtatgtgtgtgtgcgcgcgcgcgcgcgcgtgtgtgcaggggcctgcctgtgtgtgccctctggggtgtgagttcgaatccccactcagccacctcctggccctgtgactttaggaattaactccatttctttgtgcctcggtttcctccgtttcctcgacggtaaaacagaaatacatggcactacccccggggccatggcggaactattgagttaatgcaaagccttggaaaagtgccagggttgcctggctcccttaagctcccctcagggttgcctgggtcgtccccagccccacctccaagcctgctgttacagctcatcaaagagcactgcagggacagtagcgtcaccacctggaccccacctcccaccaccggacgctacagccagagcccacctcccatgtccccatcctgctccagtttgggctgtgcaaatgggagcttgagtgggtcctgggaggtggagattgtgatccccactgaactacatgggggaccctgccacaaccatgtagtggggcccagagccacctgcccccatcctgctgggcactggatcccgggctgcagcgggagcctgtggtggggccgacactccaaagcactggctaccaccgacctggctggagccacggggccacttttgaaaatatccagattctctcccctgggttccttctggtttgaatgctcttcctgctgcgcctcccaggtggcttccttcccactcagctctcagaacaagagaccatccctgcagagaatgcagtcccttcacttcccttctggttttccatgccctccctgtgcacccccctccacccactgctctttaggtacatcctctcccaaatgcagaggatggcattgggcacctactgagtgatcaatacttgtgactggatgggtgcatgagtgactggatgacaaacacctcccaccccgcaaggattgctgggaaggtggggggaggcgtgaatctgcagtggcttcaggcttccaggaggtagaactttctccaggtgacgatgcccaagtgcagatgtggggaacagacaggtggattcatgcaggtgggtggctggaagtgggagacaggaaaggagccgaagagagggcagggcccgaggcgcaggggcagggaggaggtgggagagtatggctatggcgggggccgttctcagatggcagacaccagcatcattacacagtatgatgagaaagtgcaattctcctgactcagccttgtgagtagctggaattacaggcgtgtgcccctacacccagctgatttttgtatttttagtagagatggggtttcaccatattggcccaggctggtctcgaactcctgacctcaagtgatgtacccgccttagcccccaaagtgctgggagtgggccccccgagcttctcaatttccctgagggaccccaaacttctggggcctggtgcaatctcttcctccccttgttcctctgggcctgggggttgtggcggttgctatggttgcccatcctgggctcttccatcacctgtgctgtaccaccaattccctgcactcaatgtctcctactcaaaacacctggagagggtcgggcgctgtggctcacgcctgcaatcccagcactttggctggccaaggaggatcacttgagctcaggagttcaagaccagcctcaacaaagtgagacaaacccccccccccaacccatctctacaaaaaatacaaaaactagcctggtgtgatggtggacacctgtagccccagctactcaggaggctgaggtgggagaattgcttgagcccaggaggatgaggctgcagtgagctgagattgtgccactgcattccagcgtgggtgacagagtgagacctctcaaacaaacaaacaaacaaaaaacaaaaaaaacaaaaaacagccctggaggcactaaaccctgactgatacacctcctctctccagaaaggatttttttttttaggtggtttatggagctgctcttggggagcctggagactatctaagaggctgatagggtggcccagataaacacaccagggtgacctgcgggacagagatctgagcagggccagcacctccaccaacccatccaggttgcaacagtgcacagtcacatccccaggaaggggtggccagatccccccgtgctcactgtttgccaatgcttttctctataataagcctttactttcagttctcattatgaaaataatcgatgttccttgcagaaaagcaagcagaagagaataaatattgctctcaactggaactccctgaaacaacctcttggaatattgttgccccgcattgcactgacacaggagcgtgctgggcagcccacgtgattcccttcacaccacttccctggcatggatgtgattccacaatattttaaacattaaagccaatggggatgatgatcactgagtctggctcacaggatggtgggaggtccccaggttggggtgtgccaaaggctctgcccagtgcctggcacagcaaatgcccaggtggctgctgctttccactgagacttgaggctcctgagagttggtggcaaagggctcacccagagctgaagactccagcccattcctgtgcgagggctccaggcaccttggaagcaccgtgggccggggagccaggccaggctggttgtggatccccatgagtccttgtcactgtgtggcccagctggaaagcatggtcaataatgtctgggaattgtgaaaattgtgtgaagtgtctgcacacagtaggtgctcagtaaaggtttgttgagtgcgtaaatgaacaagtgacccgcattcaccgttgcccgtgagttctgactgtgtcctgggccctgggcccctacagcctctaactttgcctcttcaaggagccagggtgggtccagccttcaagactgccagggagggggtgggaggcagggccagggcctcagggccaaggcctggggcagccacttcctcaggagggcaaggagaggggcaggaggacattcacatgctctgagcgcctactgagaaccaggtgccctgtcggtgccttcaggtcggctctcgtttcaccctcgcagtagccatgtgaggcaggcagagtcagcccccattttacagctggggaaactgaggcccagtgaggggacgtttcttttcaaggtcactcgtgggcagatgaggcagtgagatgctcttgggcaggtctgaggccctgtgagccaggctcaggggcgtgtttctgagaagtgagggaatgaatgaatgaattatgaatggatgaatgattccacctgatgccatgctcatgccctgcccacactcctgtcctagagtctggaaggtagctctcagacccttccagagggggccgggcacttggaatggtcacagttccgggcccacgtgcatggaataacttgtttcagcctcacaatcacttatgtcccattttacagatgggaaggcagaggcacggggggttaagacactaacctaggtcacacaggtaagtgacaggaccaggatttgagcccagacctcacacttaacgccctccatgccaggtgctgagatccatgcctgccgaaccctctcattcacccacagatgcccccgggactgtagtcagccccattctcacatgggaacactgaggcccaaagaggcgaagcgtcagcccagcaaggaggaggcagggcaggcggggccgcagctgtctggcccggagccctgagcaacccctccacccactccccctggctggcctgggccttggcagacctcaccccagagctggctccaaaagtgagtcctcctggtgccctacccagagggctccccatttaccctgggctcctcaacaaagatgggactcccaggccctactgagcctctggagctttgaggagtagtgaggggcacccaacccagagtggggagggcccagccctcctgggaggtgtgtggcctcccttggggggagcctcactcccagggaaggctaggagttctgtcccgggaggacaggcctcttcgggggcctcctcccaggttgctcctgcattcatgacaagttcggcccctgtgagttgggggaaattcttcaacagctccctggccagggaggggaccctcgggatcctgaaacacccctcccacctgccagtacccgccaagatgggtccctgatttgctgtgtggccttagaccagtggctgccctctctgggcctcactcccagctgagacctacaggctcagcccctgcccagccctgcctggcacccgctcaatctggctgagctccagagaatggcagggctgggctgtcacatgctgagccacgtgactggcagtggctgggggctccatcccacacagaggacaggggctctgcagtccttcacccccaccctaactatctaatcacgggccaccggtgtgggcatggtccagaagacctcaccgccctcccaggtaggcagggagctggcgggtggggggggccatgatgagcacctcccaggtgccacgttggcccagaggccccggggccgggagctacggaggcccagggcaccagggagatggtagcagcggcaggcccaggaaggggcatagaggaggctcttcctccacacctgtcaccctgtcccctgcctgtccacacccacagcagcttgcacatcatccccacagcacgctggctctgacaggtgtatccggggcgggctgggggcaggcagggacaggcttaggcacagctgcctgtgccgaacttgaggaagatcgggactacaggaaccaccaaggcgacacgtggcatcatgaccacggtcctaagcagagaggcaggcactcctcctgggaggcagaggggacatccgaaacgggtgcagccccagctctggagcaagaagctctgccacacacacgccccatgttcacatcccaccccctctctgcccccacttcctcgtttgtaaaatgttagatctgcagaaagacaggctctatgaatggggcggcccatggggtggtgtggaggaacacggaagcacagggcgctgggagaggagcaggcatgaggtatggtccctaagatggtatttctagactccagccacctttgggtctgacctctttgttttgcagaaggggaaactgagtcttgggtagggtgtagcaagacaagccacagacaaaacacctcagacactggattaaagaaggaagaggtttattcagctgggagcatcagcagacttgcgtcaagagccgagctccctgaaaaagacattcttggcctttttaaaggcttacaactttaaggggtccacgtgaaagggtcgtgataaatcgagcaagctcggggaacgtgaccgggggctgcatgcgtcagctaacagaacagaaagttttgcagtgctttctcatacaatgtctggaatttacagataacacaagtagtttaggtcaggggttgatattattatcacttttttttaactaccagggccaggtggtggcgccaaggtcttctggctatttctcttacttctgtttttttctaactttttgccttctctctttcctcctgtcttgtaaaccaggcaaggtggtaggaggagggcagcaggagtagtagtggtcttattccttaggggaggcattgagggaaggctgggagtggggggtcgagacttccttgctattctgggccataacattccacataatattataatagaatataattaatacaataatagttccccaccccacaccgggattcccagggcccactgccccactcctcctcctcaggctggccctcagctcagtgctcagccctgctgcacagcctctcctcctcctcctcaggctgcccctcagctcggagctcagccctgctgtgtggctctagcctggcgccctctgggcgttgacttcttctctgtggtctgggaggagatgtcgaggcccccgagggaggcggtggtgaaatcttggcttgcagcctccagcccgcccagagccagagtcaggcacgaggctagggcaactccgccccacccctcccccggggactggccctgcgttggacatttcttaacagcagggccaccaggcagagcgggacagccaggaggaagggcagcttggcagagcctcaggtagagtatcccggggaggctggggctgtagtgggccagcagtcgggccagagtccagctcagcaactccgggttacaggcagcccaggcgggcctagccaccggcagctgcactcagaggccactgtgtcctggctgagctcatctgcctgcctgctgggggagaaagcggaaggaggagaggcagatctggggagtggcagcgaggtcccgggcacccccctggccagcaggcacccttccgttgtccgagctgggttgccaccgcctccttttcctgggattcccggacaccctccaagggaaccaagggaacagctctgggtccagctgccccaggaaggactgtgcgccccttccccacaggggtcaagtatcccttccagcaacagccgtttcctgggcaccagcctgcatgcccagtgctgatgcagggatgtggccatgaatgactctgggaaagaatcattcttagcaatggactttgtcagggtccaagaaaggagtggccagccagccccgccccgcctgcaggaggcacttctcatcccgggaactgtgccccatcagggagccgaggctgttcagcctctttgtgacccggggctgggttggcccgagccaccaatgaggggatacgctggtccctggctccccaagggaggggctgctgagctttgggaggcctcatgaaaatccagcttaaggccatcaaaagacaaaatgacaacacatttagttatagatcaaattggcttctattcatgattcgtgaatccggacagcctccattctacaaaatggagtgagagctcccaccaggcagtggcagagcagggggttcataaggcagaaaggaggaaacagaaaaataggaaacaccaaaccgcctaataccggatcgctgcagactgcttttttctaagcggactgcttttttctaaggggtaaggcagaggggacctgatgatgccggctcaggtggactggaatctcctgcttcccggagaaactggtctgtggttttgggctctgtctgcttccttaaagcttcggtttgatgatgtggcatttggcatgagtgcctccattttggtttggtctggtctgttggggcctagtacaggagctcagttcaaaatcacagcctctcatcatgtttgtttaatgaagctacactgcaggagatcagaatcggagaccctgcggtattgggcctgtgggtcccctgaagttggcctagtgatccccgccttctggctgccctgatgggggtcccccaggccctctacccaccatgttcagtccctctgtcaccacatccctgtcctcagttgggtctcagggtgatgtccttgtctccccaacacccaccttggatcaaggccccttcaggcccctgccccaggggtctcctccctgagccctcctctggtacatccgtcctccatggatactgagcacttcccggggtcccagtgcttgaattctcccgacagtggtatgggtgccacaggcagtgcccaattttacagatgggaaacgtgaatacaaagaggtcaagcaacctgcccaaggtctccccactcacacatgtggttgctgcagtttaaacccaggtcattgggcccccagaccatgccatgctgggaggatgctcttagaaggcccatggtgtagatgaggaaactgaggcaggaagaatgagagaacgggcagagcctccgtttccctggaatccaacccacttgataggccagggtgtgaacgagcagggagtccctgcccagggacggtccctgctgtgaggttgggggcagcggctcggccagccattcactccctgtgatatgtcagccccgttcctccccactctgttcccggagcctgtgggcacccacagcgagcacccaggctggcatagtgcccagcacatgggcacctgagtattgtttttagaggcccgtggccttgagaggaagtggctggtcctgccctggcccccaggccagaggaaacagccgctatcttcatcaccaaatgatgtggcaactcccccccaccccagaagctgcaggtctgggccaaatgcacctcaacctgtgatggggggccacgccccagagacccttgggcccatcagcccctggacctcagtggctcagccgcaggaggcaagaggcagtctcagaccccacaacctaagcagtgtggggagtggcagcaatagtgaggagggaggccgaggaaatggaatccaaacagcaagagacctcccctcaccggtcacccctcccacagctggcctaccggagtccacccagccttgggtctgccgtccaggccccagcccagtgtcccttcccccaaggacttggctgcccatccccaggggactgtgagggaggtgggagctgaggtggatagccttctgctcttctggatttgggttttccaatgtgaggagctgggtggtatcaggcaagctctggccctctctgagcctcagcctccatctccttcagtggggtgaatagtggtccctcagtgggcggccgtggtggtgaaatgagcgagggcaggcatggggatcacactccttacaacctcacactgtgggatgagtgccgcgggggtgggcttgggggaccccagcccagtgcctgattcaggagttccctattctgtgtgtccacaatggctgcccagcaccctcgggagataacaggcccaggatccccccaatctcaggcagaaggcggccttggcttctccgcttgccagggtcctgccctgggcactccctgggggcctcagtccagagtgagtgacccgtaggggcaatgccagggctggttgccctgtgggagagatgtgtcctgtggccctggtgagttggtttcagcgttgctaggagggttgctggaatgttccctgcagaactccatcccccacagagctcccggcccacagtccaccattcacgttacgtgccttgcatttttgtggtttctgcagagattcttacaaagggtgagagaggcacaggcgtggtttgcctttgaccactggcagaagtctgaaggtgagagtagaatggagaaggacccaggagagtgcggagttgagggagataaatatttgcaggctacttagcaaaacacccagagctgacctttgtcgagtactttctgtgggcacaacagcaaatgttttatgcagcgtgatgtcatttaatcctcacaatgacaccaggtgccattagcatccccatttcacagatgaggaaaccgaggcagagaaggtgagtgatttgcccaaggtcccacaaccagtaagaggcagagcccggagacaggcctgatggtggctcgagaggctcgttcttggctcctgggtctcagtcctgctcccgtgacgagccatcccctatggggaccatggtgcctgtcctgtgtgcgggccactgcccagcttctcccaatcagagcaggaagatggtgggttcagcctggccccacaatcactccagctgagggctggcctggggctcctgaccaggctctcagtagcacactggtccagcagggccatcctgcagaccggagcaggtcccgccctcaaggtggccacttaacaatcacccacagccttgcgctcaccgatgctgggccctgggctcagaaccgactgtgtggtctcatcattagctggcaggtgccatcattacaccggtaacatgagaggcttcaagcactaggtctcaaataagtaggcacagaggggcctgcctcccagtctaatgagggggaaataagggagatgtggacagggttgggaggtgggtagagtgtaaccagacatttatcacatggcacaactcagaacgctggggagcagagtcaaggggccactgtgacagtggatgagggcataatctgggtgggctgcctggaggaagcatcagccaagctgagatctggaggaaagggactcggagagggaaggaggaaagggtcaccacgggtccttggcaccaggccgaggaacgagtgcgtcagagtgctcctccgatgaacttcaagtaaacaggcagggctcgggggaatgtctaggcccctaccctgcctgccagctctggctggcaccagcacggaggcaggaacgccctctcccccgccctgatcctctcccccacagctgtttctgcctcccagcaccacagccccggcagggtgggcagcagggcctccaggaggcccgaggtgttctccccctcttcctgaggaagctgaggcacagggagaagaggctattgcccactggcctggcctccctgggcagtgcccccaggctggggacagaggaagacggagaattctgtgtctggagtgctccaaggtggtggccatggtggcagtgagtcaccccctctactcatcaagctcctgcttacaccattcagactggcaggggtgaggctgccccgcctccaggaggggcatcagggcagggcagaggccatggcttggggttaatttctgtgcggcaggaagaagcatggcgctctgcctgcctgctcaccctcgggggctgtggtggagcagctgtccccaagcccacacccagtcctgcagccgcctccaggtccatggcagaggggagtggtgcgagggtcttcatgtgtgtctgggagtgctcactgttgggtgaaaggggttgcaggcagcctcagtccctgtggggtcatctgagtgggtccctgtgtgtgtataaggtagaggtgtctgcaagcccctgtgggtgcaggcaggtcaggggtgcccagaccctggggcggctgggtggtgcccatgaaggaggggcagccctggccacccagttcatgccaccccatctggcaggatggacccccttggggacacgctgcggcgactgcgggaggccttccacgcggggcgcacgcggccagctgagttccgggctgcgcagctccaaggcctgggccgcttcctgcaagaaaacaagcagcttctgcacgacgcactggcccaggacctgcacaaggtgggctggggttgggggtatgagagggtgcactggggcaggggggcatggagggcagctgggacagcaggggatgaagacacctgcgccctccatgaagcggggctaaaagcagctcctcccctaggccagagccacccttgcacattcatccagtcacttatttctgtattcatgcagcaactatttgctgagcacctactatgtgccaggtactgttctaggctctggggatatagcagagaataaaacacagttcccatgcctacgaagatgaccttctatcggagacaataaaacagcaaataaataattgcacagcaaggccgggcatggtggctcacacctgtagtcccagcactttgggaggccgaggtgggcggatcgcttgaggccaggagttcaagaccatcctggccaacatggcgaaaccccgtctctactaacaatacaaaaattagctggatgtggtggtgggcacctgtaatcccagctactcaggaggctgaggcatgagaatcgcttgaacctgggaggtggaggttgcagtgagccaaggtcacaccactgcactccagcttgggcaacacagtgagactccatctcaaaaataataataaagataataattacacagcatattgggttgaaatatgtgccctggagacacacccagggtgaaggggagagagggggccaggatcagggtgctgttgtatatgtgggggtcagggaaggtttctctgagaagggggctttagagcagagacgtgaagatggaggggaggctccccatggatgctggggagatggcagcgggcacagcacgtgcaaaggccctgaggcaggaggtgctgggtgtttctgcttgaggagcagcaaggaggccagcatagctgtcgggggtgggagaggaagaaacagcaaagatgaggtctggggtatgggccacactatgtagggcctcggaggccgtgaggccttggccttctctctgggtacagcaggcatcatggcctctgtctagaccctgaaggcttggggcctcagcccctcccaatcccagtggcagccaaggcagaaccccaagaaacacacttcccccaacccctcacccatcagggcccatgcacctgcctgcccctgcctcaggacacctgcccctgcctcaggacaccacctgcccctgcctcagcacatctgccccaggggctgcccccggctcctattctctggacaaaatatctcctccctttgccttgaaggctgtagtgttcagaccttcccccagcccattgggctccctggggactgactcccccgccaccactgagcttctgccaccggccgcctgccggccttcatgagacttgacctgacgtctgtctggtcccttttctcccttcggctctgattccacctcctgccttcccatcccagctgcaggagcggggccctacaaaggcagcagtagcccagaacattcaacctggtccctccctctggacctggtcacccccctgtccccaccctcagcaggcagcatctgcccagcgtcacgtgcaccctctcagttaaccctttggtgaatctggttgggcaaccacacccagtggcccccagaagaggctcagagagagtgtgttcttgcccaagggcatgcagccaggaagagcagagccagagtttgaacctggctcaaaatagcccagtctcccaaagtcaggtcccaggtgacctaggaggtgtggcgggcaggccaccaggctcatggggccagagcacaggctgtgggaaagtccgtgtggaaggcaccttcccccagcctcagtggctaggaggtgccagtgggcgtggcgtcttcctccctcttggggctcagctgtagccctggccttgcccctggttcgctgagtgacctcaggcagggcatctccttctctgggcttcgctggtcctctggcccatccagcaccccactggcccgtccccctctgccctgacccgggagagcctgcaccccataacctcaggcgctgcctcagccagggagccagcctggccccagtgtccctgacctgttctccagcggcctgcagcctgctgcctggctggtctctcctcccttggggcgcagagggcagggagcactggctagccgagagcaggacaatgtccctattgattcgggtctcctcactcctgcttagaagcctgacagtggccctggcccctgggctgtgggaactgacagcatttacctaggggtggctgtgcctgtgtctcctgtggaccaatctccaccctgctctttgggagactgaggtgggaggattgtttgaggccaggagttcaagacctacctaggcaacacagcaaggcactctgcaaaaaatcaaaacaaactttttttgaaattaaaaaaaaacaaaaccctaagtcagatcccatccctgctcttctcaggagtccttgcctggctgcctggccccctcaccttgcccactctgcttcttgctaaacaggagcagagcaagcgcacagccacctcggggcctttgcagccgccagggcctctgcccaaagtatgccgcctcccagtacccacgacttgcttgttccttgacttcaggtcactgctccaatgtgaccgccgcctggagacctgcactgaccgctttgtaaaaacagcacacacacacatgctcatgtggatgtatacatgtgcacacctgtgcacgcccacagccacacgctccagcagtctccacccccaccctgctccatgatttccctagcacagccacgtcctaatggagccgtcagcgttctcactttcacatggaacgactgccccctgcaaggtcggcctcagggccggtccctctgtttggcacagagacagcacctcacacaggaagcacgcactgaacatggagtgagtgagtgaacgaatgaatgaaaatgaatgaatgagttgtggaagcaggccctgcctggaggaggctgtgccctcctgccaactctgggaatcctggcccaccctgaccccacccacttcctgcagtcagccttcgagtcggaggtgtctgaggttgccatcagccagggcgaggtcaccctggccctcaggaactccgggcctggatgaaggacgagcgtgtgcccaagaacctggtgagccggccgggctgaggcgggcagggggctcaggggatatttgctcccacagggtggcccctctgggtgggagctggctgctgaggggccggggtgctgagcacttaatttcatccccggctcccggcccaggccacgcagctggactccgccttcatccggaaggagccctttggcctggtcctcatcattgcgccctggaactatccgctgaacctgacgctggtgcccctcgtgggagccctcgctgcaggtgagagctgggcctgccccttccggtcacccttctccgctcgaggcctcagggccacccatggatcccaggaggacatgggagaactggcccaggtggcaaagaggactgtctggtccaccgtccccgggctgtgtggccctgggcccgtcatgttacctctctgaaccaggttctgcatctgaaagtgggtgaggctgatgcctgccctgcaggtgtgtggagaccaggagctggctacgcctcctccagctctctccctgcactgccctgcagggaactgtgtggtgctgaagccatcggagattagcaagaacgtcgagaagatcctggccgaggtgctgccccaatacgtggaccaggtgagcagggctgccgggcaggtagagcgggaacaggcaaggctcaagggctgggcagcccctggcatggaagggcctgtcagtcagacccgagtccccacctcaatcctgcctcttctgagttgtgtaaacttgaccaagtcaccgcccctgtcagcctcagtttccctctgaggagcagcgagggcagcctgttgcccaggggttccgtgtctgcctccacctggccctggcatcagcccctccagcgccagctggactccaagctgggcctgccaatgccagccaaccttggggagctcccttctccccactttgcctccacccaaccctcctagagccctggctgggtcaggccaggcggggtggaggcagggcagggtccaggcagggcgggctgctcccttgtgttctcggagctggggtcccagaaggagcctcacccatcccgccttgcagagctgctttgctgtggtgctgggcgggccccaggagacggggcagctgctagagcacaggttcgactacatcttcttcacaggtgaggccgggacgagggtcgggacaggctggggtcggggaggacagctgctcaggggtcctgtccctaactctgggagtccacagggagactgaattctcctctctctctctctctggaccaggctgggagcagtcctggacccccaggaccccttaggaagggatggagtcccatgtccagggccagcccactgtgccaaccacagcgtcaggaaccatagcctctgcccccactgtccccagaccctcatacgtgaccctgctgccccccaggctcttagacaccaccctactggtgcccacagccctctctgcaggcagatgagggactgggcctcagtgtcctgcccagggtcaccctgctggccaggatggggacaggctggaatgtgcacacaagcccttggagaaatccacgccagaggtcactttttttttctttttttttgagacagagtcttgctctgtcacccaggcagtggcacaatcttggcacaatcttggctcactgcaacctctgcgcctcctgggttcaagtgatgctcatgcctcagcttcccaagtagctggggtgacaggcatgtaccaccacgcccggctaattttttgtatttttagtaaagacagggtctcactctgttgctcaggctggtctcgaactcttggcctcaaccagtcctcctgccttggtctcctaaagtgcagggatcacaggcatgagccaccacacccggcttcgagtttttgagctagggaggggcagagggagcgagaggaagacagtggtgctggcaggcgagtctgcgccttacaggtcgaggcagtcgtggggaagggcctggcaggattgacctggccgcctcccagcaaaggcaaaggagccctggaaggaaccacagagcccaggaagcactgtgccaggatggggcaggggtgagagtagagaaggcacagtggctcctgccggctttaatccttgaccacaagggggagaaatgccagggccatccccacagacgcagcagcgtggtccccgagtcaggtctggagaggaggccttgaggcccagacagggctagggcagagaaggctgtgtgcatgcggagactgctgggcccctggaggccagcacagaggagaggtgaggccaagccaggcaggacatggggacgcctgcatcagcctgggacagtccacctcaagggtcagaaaaaaagggctgggcaggtggcagaacttccaggtttaggtttagagaagagagacctgaatgccgtagacagagctggactccatccttgggtgataagggatccccgaagtttccaaaggagatgggtggggaggggttccatgcagcattttgcaaagagtcccctgcagggtcagccagggtcacaagcagaggcgggaggagccaaggggtttggctcagcagggggaccctgggggccgatagcagccgtgcaccattccctcctgagactctgtgcttaggggctggtcctgatgaaggatgagcagggccctgggctgcagggtggcagtgaggaacaaggaaaggccaggcgagggctgctgcccgctgactccaccacctctccagggaggagcggggccgtgggctgggccatcccgcctggtccaggtcactgaacggccactctggtttccttccatgcccagggagccctcgtgtgggcaagattgttatgactgctgccgccaagcacctgacacctgtcaccctggagctggggggcaagaacccttgctacgtggacgacaactgcgacccccagaccgtggccaaccgcgtggcctggttccgctacttcaacgccggccagacctgcgtggcccccgactacgtcctatgcagccctgagatgcaggagaggctgctgcctgccctgcagagcaccatcacccgtttctatggcgacgacccccagagctccccaaacctgggccgcatcatcaaccagaaacagttccagcggctgcgggcattgctgggctgcggcgtgtggccattgggggccagagcgatgagagcgatcgctacatcggtgagtcctgctgcccctaccacagcccacctgggccaagacccctcctcactggagggcccaaggctgggccacaactctggacccgcgcctgaaacctggccccactgccagagcccggccttgagccacagctccagtgccatgattccgtctctgtgcttctaagtctgtggccctatgaggccaaactctggtccctcaccttggattcgctgagctcagatcccagggctccagggctcagcgtgctaagatgaactcccatcccaccactggctatcctgaaaggctgtaacctcagattctccgagcccacaatccccaggttctaaactccgagagtcccgtcctgagcccccagtctcctgggccgtacggctcagcagctcatgggacactgcggcgccaacattctgggacgctgttgcctcatgaactccaagggttctaagatcccatcacccctgactgtgagaccaaggtcgggggattctctgtgtcccacaggccctgagcaggctggggaagctctagagtcccttctggggggctgtggggagactttcttccctaaacactccaaagcctgaagccttgggaagtcagaccttgggatcctggcctagagccctggcctgtggccctgtccccacctctacccccaccctgggggcggtcctgactgtggccccagggctgagctgtctctggtgcctgcagcccccacggtgctggtggatgtgcaggagatggagcctgtgatgcaggaggagatcttcgggcccatcctgcccatcgtgaacgtgcagagcttggacgaggccatcgagttcatcaaccggcgggagaagcccctggccctgtacgccttctccaacagcagccaggtgggggtgcggccgggctgggcagggtcaggagcccgcagtgggcagcacaagtggtggcagcagggggggcaccaaaatccagtggcttcaggactttgggatggtggacctcttggctctgtctctgcccactctcctggaagcagctgagcctcacccaccccaaccctgtccccagtctgggccccactctcctaggccttcagtgggcagcttcctggggtatgggccttctctagggtccagtgtttcctctaggtcagcccctgcctttgtccttcttacacatcggggcctggtggccacatgacccctcaagcctggctctgaaggcacaggcaacgtgtcggggatgacccaaaggtgcaggtccaagaatgagccctgatcccctacccctgcttaagctgcagaggcagcctgggaggcccaaggccagagtcctcagattaaaaaacaccaagaggtaccagcagtccctacccaccccgcccccttccccggccctcagccagttcctcgattccctccacttgaacttttttttttttttttttgagacagagtctcactctgtcacccaggctggagtgcagtagcacagtcttggctcactgcaacctctgcctcccgggttcaagcgattctcctgcctcaacctcctgtgtagctgggattacaggcgtgtgccactatgcccggctaattctttgtatttttagtagagatggggttttgccacattggtcaggctagtcttgaactgctgacctcaggtgatccacctgcctcggcctcccaaagtgctgggattacagggatgagccaccgtgcccggccacttgaactttttttaaataaactttgtattgggaaatacttttagatttacagaaaagttgccaaaatggtacagagagttcccatgtaccccacacctaatttcccccatttaatggtgcttagatgggtcaaaactaaaaaagtgatggcagggctgggcgcggtggctcacacctgtaatctcagcactttgggaggccaaggtgggaggattgcttgagctcatgagtttgagaccagcgctggcaatatagcaaaaccccgtctctatgaaacatttttttaagattagttgcgcatagtggcgcacacctgtaatgccagctgctcgggaggctgaggtggaaggatctcctgacccataaaaaaaaaaaaaaagtgacagcagtgctttactattaactacactctagactttatttggattttgctgtttttccactgacatcctctttcggccccaggatccaagccagggtcccaccttgcattaataaccctctcagcttaaggagtgctggacaggtctcctgtagaacatccccagcctcaggtcatctggtgtatttctcatgattaaagaaaggttactggttttaggagagaatcccacagaggtgagcctgcctctcacaccacatctggggcacctgagatgcacacgtggctagtgagtggaaccttcactaccgggtcaggacggtatctgccagggtttccctgggaagctactattgtttgtttctttattatttggaagcaagtctctaagcctaccccaccctcaccaggtggaggtaattaagctgtatgctgctctatcatattgttagttattatctagttattttatacattcttttcttattccatttgtggtttggtggaattttgttgtattgccatttgatacctttctcttcctcctttgtatgattgttttatagggcctgtgagttttgtacttttgtgtgtattatggcaaataccaacttgtttttatgttaagactcctttgagcatttcttgcaggactgatctagtagtgataaattcccccagcctttgcttgtctgggaaaggctttatttcttcatctacgaagcatagtcttagctggataccgtattcttggctaacagcagtatctacatctatttcctggaattctgtaagaaagattcatctcttgaattgtttatttaggtcactacggactcaggtatatttatttgactccaggggctgtaatccaaggtcgtgtggtttgtctgaggctcgggctcagaagcccatgtaagatgtcccagcctcttgggttgtgaccacctccttcccctctggtgctacaagcagctccaggctcatcttgtatctcccctgctccaactccagaagcagccattccttcaaggagccctgcttcatctggatactttcacctttagaaaactctacagaggttttttgacagtggagtcatctggcttcaaacttttctgaccacccagaactgatcccaggacacacagtcacacctaagacacaagtcatgcacaaggtggcttgcccgtactacctgggacgccctctgctgccttctgctccatctcctccatctgctgccactgccattgtgggtaatgctggtctcatgccatgaagtgacgtctgaatccactgggggcagtccgctttccccacatcagacaagccctgacccagctgtgatcagaggttcacggtgattgcaactaaatatactgaagtttttgtgcagcaactatttagtgtctaccaatctttttttcctttcagtcttcaaataagtctacagattgaggaagaaggtccttctcaaggaccttcaagcaagggccaagcttctgtttctaaagtgcaaatctgaccacatcattatgttttcatgtccctgtgttcacaccacacagctcttcagcctccactctgtctgcagtgccctctttgcctgaacaacttctgtccctcccagtccctccactcagcaggcacatgacacccctctcctgggatgcctccctactgtccagtactgccctgctgccactacaccctccatgtccccaagcaacactaggtttcctgcccctacccccagccctaagagtctgtgccatcagcatggaccacacatgagcagatgtccaggaaacatgtcccaagttggaagcttcatgaggagctgctacacaaccccctgccccacctgtaccatcacaggcccttcagctgacatggtggcctcagaccctttctgaggcaagatcagtgtcacagagtccagcatggaacaggctctgggtcctgaggatcctgatggggctcaaggcagcctcacgcacatcctgttctctcccaggtggtcaagcgggtgctgacccagaccagcagcgggggcttctgtgggaacgacggcttcatgcacatgaccctggccagcctgccttttggaggagtgggtaggtgcctgctaccctgcccttctgttaccatttggtcaaattgcaatagtgttacctgcatacatttctgccaaagcaccccagccccacctcaatgtagagggacaggcaaggaggcctcaccccagaacccgcatcctgctccccaccccagagggtctgagtccaatctgggcaacacagtaagaccccatctcaaaaaaaagtctgtggtggaaccttctagaccatctctgcacagacacacaatttagtgaatttttaaaaataccacacaactatgatcacactgcccactgcgatgctatttgctcttctccccaacagcatgacctggtgtctgcccctcagcagcaatgccgccggtgtcctttactccagggcagctgctcctctaaccccatcccccctccagctctcagtacaacacctccccaccctgagaggcccggatgagtgccaatcctccaccccccagagcagccccgatgccactgcagagtcctggcctctgagtcaggaagcctcagagatggtcctagcaacacgctgaaggccctgtggcccaggtgacatctcccctttctgagcccacttcctcctcagagaacagtaggccccgagcaggtgacaggcagtcccgccacctgtccacactcagcaccacagtgaacgatggcagggccaggcaagctgcctcaggtgggtccatgcccttcctggagggcagccaggggcacaacagtgcctgtgctgctgtcctggctcggctcgagtttgggcggctgcccccgaccccacctagctgcctccccagccccagccccagcctcctcaacccgcctccctgccctggaggagagtcggggctgtctgtgggcacatctgaccctgctgctccctcaagaaagcctcccccagctcccaggcccccgagctgacccttcttggtggccgtggccccaccccggcttccccacctgctgctcccacagcctgagctctgcccaggtccctaacacaccgcatggcacccacctctaaggctccccaagcctgggtccctcttgcccccacccactctcttcgtcttattaactgcatatccttggagctcactcactgcaggaagccccccagccaaccccactccacccaggctgtgctctgaacgccctggcctggggcctcgtctgcctcccaacctagacgctgaggagagttcactgcacatagcacctactgggtccaggggtctcaacatcccctcaatccccaccacaaccttaggagggaggtacccttgtcaccccacgacagaggagactgaggcacagtccaaggtgacatggattgtttgcagcagggccagagtttaacccccggcagtctgactctggaatccatgcccttgaccaccacccgcctatcttgccctggcatctggcatccccagggcttactgagctggtgccaagctcggggccaagccctttacacacagtgcctcatgatcagcccactggacagatggggaaactgaggctcagaggggagaagtagcccgcctaggccccactgtctgtgactaggagacccccagcgcctgaccacctgtgttctgtgccactgtacaggtgccagtgggatgggccggtaccatggcaagttctccttcgacaccttctcccaccatcgcgcctgcctcctgcgcagcccggggatggagaagctcaacgccctccgctacccgccgcaatcgccgcgccgcctgaggatgctgctggtggccatggaggccaaggctgcagctgcacactgctctgagcccttccccaggcccaggctgtagaccaccatgacagctgtcgcctgcggctggtggagacggggcctgggctcccgggcccgaggaggaaaaggattgccaaggctccagggcacccctcaaagcagcgcctgcctcctccctcctgggtcttccctctccctgcctcagcctcctccctcagccgctcccaaccatgagagccgaggtgggaggcatgggaaacagtgcagtgactcaccccctgcccccgcaccaaccacccatattcaggagaagaggacagacacggcacctctgagtcacccctctcctgtggagcgggcgtccgaggggccctggcatctgactcaggccacaccatggaatcactgcatccaaggccattcctgccctctctgagtctcagtttttccatttgttcagtggagagaattaaccattgatacctcctggctgggtgaggcggctcacacctgtaatcccagcactttgggaggccgaggcaggcggatcacctgaaatcaggagttcaagatcagcctggctaacatggcgaaaccccgtctctactaaaaatacaaaaattagcctggcgtggtggcgcatgcctgtaatcccagctactcaggaggctaaggcaggagaatcgcttgaacccgggaggtggaggttgccgtgagctgagattgcgtcactgaactccggcctgggtgacagaaggaggctctgccttaaaaaaaaaaaaaaaaaaaacctcctgggactgttgcaaggatgaaatgaaggattgagggattgagggattgctgagctggagctccaggtgtcctatctttctcagtggggtggcacggagcggggccgcctccctcttctctccaggcaggtggggctgtggttatgcgatagggtctcccttccctccagcccatgccagaggagcttgtaactctttatcctcatggtgcccactacgagtcatactcttccccatgctgctcatcctcctgggccccatccactcagccaaagcagaatgcagggtttcctgcctgacaacccttctcacctcccaagtcccacttttgaacaagctgatgattctgaaactggcccaatttcctaacaagccggatgcttgagaaacctacatttggacaatgagaggctgctcctgcggcctgcgggccacctcctcttccttggctcctgctttctttttagactatatcaacctacaactttagtcgggaagagggacaggggtggacctgagtttcgtctcctgtctctctggctgatgtcacctgaataaagccttcttccctggcaatacttacatctcagtgatttgctttctgtgcatctagcaacaggactctggaccaaggccctggcgttgggtaacaattctgtaatgctgcaggacttccccaatccacgcaggaatccccgcaggcatccacgcaggaatcacctgatgaagggccagggtcaggtgtgggccaccatcccaagacctcccttctctctagggccagcccctctcctctgagcacctgctgaccagcccaaagccctctccactcctcagcttgaactcccccagggtctccctgtggcccacaggtcctttggaggctcgggcatctgcatgcaaatcccaaaccactgtcccctttgcacacactgagcctgcccttgtcctcgtcctggtctaccatgcgtgtcctccctctgcacgggcatgggacatgccctctgcctccttcctgtcctggcctgcccaactcctacctaccctcagcgcagatcctcccaacacacacatgcaggcagcctcggggcctctgcgggtccctctaccacagcattcccggggaaaggcccggcgtggtggctcacgcctgtaatcccagcactttggcaggccgaggcaggaggatcgcctgagtccaggagttccagaccagcctgggcaacatggcgagaccccgtctctacaaaaaatacaaaaattagccgagcctggtggtggcaggcgactgtggttccagctgctcgggaggctgagaagtgaggatcacccgagcctgggaggtcgaggctgcagtgagccgagatcgcaccactgcattccagcctgagccacagagccagattgtctcaaaaaaagaaaaaaaaaaaaaaaaaaaaaaaaattcgctggtaggaaacataggctggttgagtacgggagtcatacagatcaggtggatcaggcggccgcacaccgcagctctacggcccgggaacgttactaaatactcccatgcctcagcttcccgccttaacgtggtaacacgttactgtagtttctccacgcagagctgctgtgaggattaaaagaggccgcgtgagttgagcatctcgtcgccattaccgtcatcacacgccccccacccaacccggcgggcccaccctctgcacccacggcgaaagcactctttctaaaccacgccccggatgtcccgcctccagcggctcggaggtcttcacttattggcctccccaaaccaacatggcggccccctacaaacttcaagcgccggtctctcctagccaatcaaaagaaagatatttctgaatcccgcctctttcagcagccttgctggccaatcagaccacaccatgaagcatcaatacagaaaagggggaacccgctggcccaatggcagcgtcctacagtgtagcctccgcctcccgattgactggcctgcttggcaaggcaagtagcggcggcgcttcaaggtgggtgttcacgttttggccgtgaaagtcgggcttgggcagcgtggcgtcgggggcgagtgtggtgtccccgttggcgccgccagctctgcgcctgggcttcccctcggctcactcaggatccgcggcctccgtgtccttcaggtgcagcggggagccggctctcagggcgcatgcgccgcccgctctgcgccaccggcctagttagggtcggagatcactgggaaggtggggaaggtgctgggttgggtccctggaactgcagtcagtgatccaaaggagtgggcctgttagggggttcacaggtcgtgggatgagctcttatgagcgccggctaagtgccgggctctggggtgcccttggcatgtacgggctcccctaattcccaagaccaaccgcccccaacccacttcataggtgagaagacggaggtcaggtcacatcatctgcccaaggtcacgcggcaggctgggggacagttccaggagggccttgaagctggggaaaggaatgtggtaccgaggactgttcaggccttgaagagtttccagcagggcagggctgggttccgatcctcggcccacctccttatcgtgtgacttccgacaagtcacttttttatcttttttttgagacaaggtctcactctgtcgcccaggttggagggcagtggtgcagtctgggctcactgcaacttctgcctcctgggttcaagcgattctcctacctcaacctcccgagtagctgggattataagtgcccaccaccacacctggctaatttctgtattttttggtagggacggggttccaccatgttagccaggctggtctcaaactcctgacctcaggtgatccacctgcctcagcctcccaaagtgctgggattacaggcgtgagccaccacacccagccctagcgagtcactcaacaaactgagtcccagcgccttatttgtgcctccctcgtggagtccttgtaaggataggatggcagcgctttccacccctgggcacggttcctgggggaggagagctaacaaagttcgctctcagtgcatgctggcgggggctggtaatgttgtttttggttagatttggggaggatgaagggaggagcagaaaggtgggaaacaggatctctgggagggagaaaggaaggatggatttaaaaggtttcttaggtgaggcagaacttggggtccacagaaactgaattgtagctcagccaagctgaatcagatggaaagctgggaggcgctgggaacaggaaagccatctgtgcctctgacagcaatggggtgcgagtagagggcaaagtgacacatgtcagtggagacttgggatccttgcggtgccagtctcagaagaggatggttcttgggcacaccccaccctccatccctttttatgccaccagatgcgctgcctgaccacgcctatgctgctgcgggccctggcccaggctgcacgtgcaggtaggaccaaagaagcctttgctgggggtaggggagtccagtctcctggtatgacgtcacgcccttctttttgcaggacctcctggtggccggagcctccacagcagtgcagtggcagccacctacagtgagtacctgggtggcctctagcctcaggtgttcctgactggtcctgctggagtaggggaagagacctgagttccagtcctggctttgtcaggggcgttcttctctgagcctgtttccacttttaaaatgattatggtgatggagactgactctgattcacaggggcagggtccatcattgccgaggttagcatgtgtgatctcagagctccctgggtgtgatggggagggggttgccaggtgtgagccatgggtacctgtgcctattgccagtccctggtgaaggcaaaggctcaagccccccacctaccccccttgattcctctttcaagccctgttgggcagggaagtgcgtctgggctccaatggccacccaagcacagggagaggtaggcacggacgggctcaggccagaggcggcctccagggtccttgctgaggctggggagaggtgtggtgagtgtacagcccctttgtagcccagcagttgcacctggaagtgagggccaggctgctctccctgaggctccagggagacagtgtgtgaggcctcttgccatggcctccctgcccgcctctctgcagagtatgtgaacatgcaggatcccgagatggacatgaagtcagtgactgaccgggcagcccgcaccctgctgtggactgagctcttccgaggtgcgtcctgggcatgaggggacagggaaggtgccgggtgggcacggatgcatgggggaggagggtgcccctgcccaccacacccgtgctgcccacaggcctgggcatgaccctgagctacctgttccgggaaccggccaccatcaactacccgttcgagaagggcccgctgagccctcgcttccgtggggagcatgcgctgcgccggtacccatccggggaggagcgttgcattgcctgcaagctctgcgaggccatctgccccgcccaggtgagcccctgccccaaccggccaccacgccagcccctgccactgggagagggaggccaggcagccctaggcccaaaccctagcccctgcttgatgtgcgtccccaggaagtccctttccccctctgagccacttccctcgtgaatgggaatgatgagggcttgttaccagagcacagagtcagtgagttggcagagtgaagcttccagccctgggcaggcgcctgacacacagaggttcccccttggggtctggccaagggtgtgacccctgggcctctgagccatggggtgacacctgaggccatccacgcctccctggatgtagccaccgtttccggagtcctgcttgtgtgcctgttgcagcttcccttccccagtggctgctcccctgaggcccggctttccgttctcttagtgggtctcgtgcttacccgtgggggccaggcctgccagcacgggaacaatatgactcggtcagagctctggtcagacccctgtgtgtgcctggcaggagccccggcagccgccgccgctactttctgtgtgcacagcaacccctcccagtgttctgtgactcgggtggctcctgtccagatcctagtttgtcctctggagcactcccaggtcctccaggccatgagctgcggccctgatgtctctactccagccacggactgagagtgcataggagtgtccccaaacagcagtcacgatggtcacaaccttggcttccagacagtgagtgctgtccacagacagacccggtgctgtgccatgtgtgtgactcacagcctctcctgtaatctccacaacccctcgaggaggtcgaggttattgtctccatctttataagcactaaaggatgagcctgccagccacaggtcccactgtgagttgtggacactacatttctgggatgggggcatatgagagtccttgccaagcacatttgaaggttttcccagccagcccctcccccagcgggctacccaggaactgagagttaggacgtgcccttgagtttgggctgtgcccccacttgctgtgtagctttggggagcccctcaacctctcggaaccttgtttttctcatccatcaaatggagagaagtagatttaaggcacaggattgcacccaacagtgtaggcattcttggcgatgttgcaggttcggctccagaccatcggggtaaactgagtcacacagctgttttggttttccagtgcatttaaaagttagatttagaccgggcacagtggctcatgcctgtaattccagcactttgagaagccgaggtgggcggatcacttgaggtcaagagttcgagaccagcctggccaacatagtgaaaccccgtctctactaaaaataacaaaacttagccgggcacgttggcaggtccctgtaatctcagctacttgctaggctgaggcacgataatcacttgaaccgggaggtgggggttgcagtgagccaaaattgaaaaaaaaaaaaaaaattagggccggttgcggtggctcacgcctgtaatcccagcactttgggaggccaaggtgggcggatcacaaggtcaggaattcaagaccagcctggccaacatgttgaaaccccgtctctagtaaaaatacaaaaattagccgggtgtggggttgcacacctgtagtcccagctactcaagaggctgaggcaggagaattgcttgaacctgggaggcggaggttgcagtgaactatgattgcaccaccatactccatcctgggccacagagcaagacttcgtctcaaaaaaaaaaaaaggatttacactgtactgtaggctgcgaagtgtctaaaacacaatgtatataccttaattaaaaatactttaggggccaggcacagtggctcacacctgtagtccaagtgctttgggaggtcaaggtgaggggattacttgagcccaggagtttgagaccagcctgggcaacatggcaaaaccccgactctacaacaacaacaaaaaatacaaaaaattagcccctgtaggcccagttacttgggaggttgaggtgggaggatcgcttgagcctgggaggttgaggctgcagtgagctatgagctgcaccactgtactccagcctgggtgacagggcaagactctgtctcaaaaaacaaaaacaacaacaaaaactttattcctaaaaagtgctgacccagagataagaagcaagcacatggttggtaaaatgacatcagtgagcttgctttatgcagggttgccccaaaccttcaatttgtaaaactcaaaatatctggaaagcttggtgaggcgaggcgggactgtaactcagcactcaccgcagggtgagacccttagggcagcgggtgctacactgaacaaagcggtgaacagccccctcgtgagagggggttcttggcagatgacgccagcagctgacaaacaggcaaggcaggccgggcacggtggctcacgcttgtaatcccagcactttgggagtccaaggtaagcggatcacaaggtcaagagatcgagaccatcctggtctacatggtgaaaccccatctctactaaaaaatacaaaaattagctgggcgtggtgatgcacacttgtagtcccagctactcagggggctgaggcaggagaatcacttgaaccgggaaggccgaggttgcagtgagccgagattgtgctgctgcactccagcctggcgacagagcgagactctatctcaaaaaaaaaaaaaaaaaaaaaaaaaccagcaaggcagggacgccagcagggcacgtgctgaggagacaggcgcgagcaccagaggtgcagggcggcctcttagccggagtccaggaggcctttgaggggagagggcttctggcagaccccaggggtggggatgagcagtgacaggggccctgggggctgggatgtgacagggcagcgtggcagtgtctggtggcccctcccgcaggccatcaccatcgaggctgagccaagagctgatggcagccgccggaccacccgctatgacatcgacatgaccaagtgcatctactgcggcttctgccaggaggcctgtcccgtggatgccatcgtcgaggcacgtgaggcccccgggtgggagggggcctgaggctcctcagcagggcctaaccaccgtccctgcacctcaacctgcagggccccaactttgagttctccacggagacccatgaggagctgctgtacaacaaggagaagttgctcaacaacggggacaagtgggaggccgagatcgccgccaacatccaggctgactacttgtatcggtgacgccccaccggcccgcagcccctgctgcccaataaaaccactccgaccccacggcctcttgtcttgactctggtggtccagggtggggccgttcccggcctgcctgaggcctgtggtgcctccaactggactaggtcgccacctagtctttatgctctctggagtcctgctgccccagccctgccttcctgtagactccagggccccaccaggctctcatggctagaccacaggccgcagcatccctgtcaccctgcctcttcctgggcgtcttccccaaggcccagcgatgccagaggtcaccacagacctgccgttcccactctcccgggtgtcctggctggggcctgggcctcctgtctcccaagagccatccacttgtaagacgcttaggacttggagcctcccaagacctcaggctgaagaacagcaagtggcagaaactcaggccggggcatccttgctgggggtaggaggaagcctgcttggggtgacagtcacacgagggtgacacaggccctgctggccctgagctggcctgcgtccagccacatcctctttcctgtgttccctacgccagggtgctggcccggccactgctcaccacttcctgctttgctggcccagcgacacggtggggtttccctagggccacacacaagccccttgcccatataatggccaaaagcagcccccctgaacttgtgctaagtactgtggaaggatttcacttcatttgcagtgaggaaaccagctccgagaggtgaaagggcttgctcagggccatgcagggcacatcccataataaaactcagttcagagaccttgaccccccccatctaccatcatttccaaaagtgctttttacaaagcactactttgtaaaaagctacttcttcgaaagaacaagtttcctggcccagtgagtgttggaaatgctccagctgctgtgtgcctgctggcaggtactgcatggtagacattcaaggctctgagaaggcctgcagcaaaaacaccagcctctcccagcccattcccagggagcttttctcaggtctaacacctgggcctccttcctagaccaggcattgccatctaatgccaaagtggccaggctcccgcttgggccccacagcctgtggcactggggtgagaagtaactgcaggaggcgaggggaagcctggagcccgggaagtgtccacaggtctggcccgcagctcatcttggccactgatgaaaacaggtgttctttccaaaaacaaggcaggcgcaggactcctgaagcaccgccggtttagcttttcccagacgtaaccgccgtcagagcgtggcatggagcctgtagctgtgcactgaatacttctattccaagcgggtcagtctttccagctcaccgctgggttctttcccttaccgtggtctcccaggcacttactgctgagaccccactcaggctgtctggttgtatcaggccccgaccctgtcagaacaggcctatggcgcccaaccacaagtcccccaattttctgaggaaccacagctgagcttggctgtgactcagtttccaggcccggctctggggctccacttgtccacccctgccgcagccccacaggcctgtgctcgctgtgtggggcttagggatcaccagagctgaagggcccctggcctccagtgggaatgccccaggcctgtccaaagtgcaggcagctggacggtcgtgagtcccagcttccaggcactaggacctgatgacgcccatggtgctgacctggagcaaggtcacagtgacacccccctctaccccccgcggctgcagctgcaggtggagctgacagctggcctctggccccagggtatctcccagggcctgctgggtgcggggcgctgggcagaacaaggcagcatggcctggccctgtgtcctgctgccagtgaagcaggcccagagtggggcagccacccacccaagggccagagcggggcctctccagggtggtcaagagcaggaaggtgtaagcaccggcgggtttcactgccgcccaagggaggggtcccggaggtgggggagcatcctggggaccccaagcccatgagcctgcgaatgttggggtcccatcagccagaggcgcacaagcctcgaagtgagaggagagcagggtctcatctcctatcctgagctgggcctgagcggagctgcccctgcatcggggccagcatagacgcgcgcggttggcagtggtctgttatccgctcctttctccaggcctcctctccgggattaagcgcctcaggacccgtccgccaggccacagcctgggctcaacctctcccagacttcctggactccagtggagccttgggccgggggcggggcgtccctggcccctccccgtcgtcccgcctgcccggaaaggagtgagcggcgcctagtcccgggctggcgggagtgcagttctgagtcccgcccggcgtgcgcggagcggggcagccagcagcggaggcgcggcgcgcagcacacccggggtgagtgcccctgccggggtctgcggagccccagaatttcctgcccaccctcttccccctgccccggggaggagatcctggcgccccacccagttggctccgtgaatgcagctcagcccgccaccccgcagggtgtcaggccttgcggggggccacggaggatccccaagggaggaggagaaggatggggtgtttaccaacacagcccagcgttcccgggcctggtgtgcgcggagctttccccgctgctgcttccttggagggagggacccattctacagatggggaagctgagaccacacaactaggaagtgtcagagctggagaccagctgggtcatttgactccagagcccaccccatttggaatggagggggcgccagaccctctcctactgccttcccatcatctggaggggagggcagaggtgcagagagacctgctgggttcctggaggggccaggaaaggggcacagggtgaggagtgggctggagcctggaccccagggccgcaggatggaggcgtattcatttacaccataaaagtggctgggtgaccctggctagagcggggaccaagggggacaggggtagggggtgagccagtggagcctcacatgccaggcacgggggctgatcacgtccccacacctttccccccgcccattacaggttgttcccccaccccctgggaagtgctggaaggagcccggccctcgagccctcggcatagtggctgtgggagccctgatggccctgagccaggggtgacccctccccagatccccagagctgattccccacacctccttatttggccagcacagccccaaagggagccaggtcagacacaaccctcctctgagctcaccctttgtgctgggcacataacattggactttacctctccaagtgtcagtggagtcctgtatgaaacaaaagcaccgtaccccctccccaagggtttctccccccagggattagtgtgaggtcgtgtggatgaagggattcagttgaggctctggttatttttgtcacctccctagatcctgtctctgtcaggggtgccacgtcccattcacccaaagaggaagtagaggcacagagagggtgagagacttgcccaaggtcacacacccaatctcagcctgggctccaagtccctctgccctgtggccgggcctggtccttagggatggaacccagccccgctgccccctgccctgcccacctgcagccttgggccatctgctcagtgttccctcgttccctccttctctcctttcccaggctggggctggggctgcgtttccctgtttagagttaagtaaaccagacccaggggaggaagtgactggctgggcaggcggggccctgaccaggcctgtcccctccccctaattttcgagctaagcaactgattcccacagaggggccctgggccctgagagcagtggctttggagctggaggggccccagcatccagggcgggttggaggtggcctggcacctgcccccaccccacatcggccttgagcaaggccccgggcccttccccgccattctgtagtttcacttttgttggtttcaacacctggaaggctgcggctgctgccgggcggcccgggcctcaggggacagcccccccacagcagtgctccctggctagccccagggtacccggtggagatgcccgctcctaccactcagcacatgcagctccacagggagcagcgagggctccagccacccccggggcagccctgggcctaagtgcctgggccagtggggtcctgtctagggtgacggcagcccgagaggagggaggccagagtgaaggtgggggtggagccggtgtcactgggagacgctggaggtaggggcgggggtccccatgggcagagcaagccaggagagagcttgaggtcggcctgagggtgggcttcggggtctcccagtcccactgcttactttctgcgtgacctcagcaccgcatcaagcctgcccaggcctcagtttccacctctgtcagatgggggtggtaacagcagcttccaggattcagtgagtgaaggtgcacaggtgcccgtggttgggaactgtctgtggtctgcccctgactggcccccatccgtgtccacccacaggaccatgggctccatgttccggagcgaggaggtggccctggtccagctctttctgcccacagcggctgcctacacctgcgtgagtcggctgggcgagctgggcctcgtggagttcagagacgtgagttgggtgggcaggcgtgggaagggggctactgccaaggttagcccggaggccggtccaggatggggactgccccccctccgccatagggccctggccccatttgaaccccagcggcccctgccatgggcactgctcatgggaagcccgcagctgaggcccctgagctggctcctccccataccctcctggggcatggggtctggtctgtgctctgatctgcgtcttgtggctcccagggcactccacacctttctggaggaggcagctaaggcctggggagagtcaggcctgggctctagggtgaggagctccctgacccccttcccgggacactcacccctccgtgtggcacccacagctcaacgcctcggtgagcgccttccagagacgctttgtggttgatgttcggcgctgtgaggagctggagaagaccttcagtgagttggtcccaggcctacattccaggcaggcttcctggaggaggcatgggccaagtttgatctgaaaggaagagtctgggtttgccaggtggaaggcagagaagggaggtatatgcagggccctgcagggccaagacagagcagctgggatctgtgaagtgtgcttgcgaaggtggctgccttgtgtgggctgagcagagggcctagggcagggctggctggggaggcctcgaatacagcataagagcccaggacttcgtcctgtgggcgccaggaagccacaggggtttctaagcagggaagaggcacagacagctttctcctctacagctgggctggggtgggtggggcccaggatctagggtagggtacccctaaggagcaggcaaaagggacccctgccctgggcaacccctctcaggaggagcctgtgggggcaccaaggcaggggcatggggcaggcagggttttgtgtttgctggtgcagtttacagcttttcaatgatcaggcagacacaggactcacgccagctccggtcccaagccctgcagcgcaagggccggcctgtggggagacctcaggccctcttctgagtggtggccaagggactggggagggagagtgagcccagacctgagctcagggaggggagcacagcttctggatgaaagtttggccgggattttctggccacctccacctggtgaatccagcagctggtggccgatggagtttggggcagcaggtggggccctcaactgttgagacaacctcaactgcaccccactcccgttcctctgcgcccagccttcctgcaggaggaggtgcggcgggctgggctggtcctgcccccgccaaaggggaggctgccggcacccccaccccgggacctgctgcgcatccaggaggagacggagcgcctggcccaggagctgcgggatgtgcggggcaaccagcaggccctgcgggcccagctgcaccagctgcagctccacgccgccgtgctacgccagggccatgaacctcaggtcagctcccacccaggcaggagactggggggctggggaggggctgtccagcctagggctcatggtgcttctgggttcctagctggcagccgcccacacagatggggcctcagagaggacgcccctgctccaggcccccggggggccgcaccaggacctgagggtcaagtgagtgagggatgacctcatgccctttctggccagcccagaacccctggccagtcgctgggctgggccaggctgagctccgactccttgtccagtgctctccccaggctggccccgcctcctccttcaggcccggaacttcccacagtcccaagccctagccctagggggttctcctcttctggtcctgcccgggaggcctcctgccttcccctgtgggcagggccagtgtgcccaattgcccgattgcccgtgctgggcagggtcctgcccggggggcctggtgggggaggcagggcaggaggttggagcagccctgcccagccccgtggccgccagctttgtggcaggtgccgtggagccccacaaggcccctgccctagagcgcctgctctggagggcctgccgcggcttcctcattgccagcttcagggagctggagcagccgctggagcaccccgtgacggtgagcagctggcgctgggctggggggtcctgggcagagcgggaccccagagtcagctgagcctgctctgcagggcgagccagccacgtggatgaccttcctcatctcctactggggtgagcagatcggacagaagatccgcaagatcacggactggtgagtcactgggaacacccgccccaccgccctgctccccaggcccctgctgtcacctcccagcccgccctatcgtgactcctccccatgagctcccttcagactcagagtctcgtagctgtgtccttctggcccctcacgcagcgcatcctccctccagcttccactgccacgtcttcccgtttctgcagcaggaggaggcccgcctcggggccctgcagcagctgcaacagcagagccaggagctgcaggaggtgggtgcccccggccttccggaggcgggtgtaggaggtgggtgcccccggcctcccggaggtgggtgcaggaggtgggtgccctggcctggcctccaggaggtgggtgcaggaggtgggtgccctggcctggcctccaggaggtgggtgcaggaggtgggtgcccccggcccagccaccccacctgcctgcccagcccccgctgactgcccactctggcgcaggtcctcggggagacagagcggttcctgagccaggtgctaggccgggtgctgcagctgctgccgccagggcaggtgcaggtccacaagatgaaggccgtgtacctggccctgaaccagtgcagcgtgagcaccacgcacaagtgcctcattgccgaggcctggtgctctgtgcgagacctgcccgccctgcaggaggccctgcgggacagctcggtgagcagcctgaggcctcgccccctctccgcccgcccctcctaccaggccggggcgtttctgcctcacttccagcctctggctccctgcacctgggctttgcctaggggctccttctcctcccagcctcctccatggcccaccgcttccagggagtctgccctgatggccctggcccagcaagccctaccctgactttcctaagtccctggaggctgcacaggatagttttaaagtcagaagcctcattccaatccaggcccccctgtgaccttaggcctgctcatggtctgtggaaccggtgtgatgcccctgcctccgggggtcacccgccgcgcacagcaggtgcttgcgggtgaggctgggctccttctcctgggccgtccctaggaggcagcatgcttgcctttcccaagcaattgccaatccatgtggtgtctttgggcccccaccagggcagagcagggctgatcatctcacgtcagagagaggggaaggggctgcccagtgagcccccacagggctctacatctccagctgggcctggctggagatcccagggtccctgaaggcccccgccaccgttctggtctgtctctgccctggcacccagatggaggagggagtgagtgccgtggctcaccgcatcccctgccgggacatgccccccacactcatccgcaccaaccgcttcacggccagcttccagggcatcgtggatgcctacggcgtgggccgctaccaggaggtcaaccccggtgagagccacggcatccttacccgtgtcctgggaggctcagctgccccactgggtgggtgtgagcctgagggggaggtatctccatcctgggcctggcctgccctcctgggatgaggggcacacatcccatcactctcaaggggctgttgggctctgcagccagtgtgaggctttatgtcggcccccagccaactcccccttgttgagtttacaagggagccggcacgggcttgtgcaaagaacagaggctgtgcggtgggcatggcccaggttggaagcccatctcgcctactttgagacatttcttagcttctctgagcctcagctgcctcacctgcaaaatggaaataatagcgcaaacctcagaggaatgttgggaagcttagtgactgttggagactgcaagctggagccaggggcagcctttggtgtggttgctttggttgcacagctttttttttttttttgagatagagtcttgctcagttgcccaggctggagtgcaatggcatgatctcggctcactgaaacctccgcctcccaggttcaagcgattctcctgcctcagcctcccaagtagctgggattacaggcacgcaccaccacgcctggctaatttcatatttttagtagagatggggtttcaccatgttggtcaggctggtcttgaacccccgacctcacgtgatccacccacacaggccgttgggggcccaagcaccctgactcttgcccactggatgaggcagggcccctccctgtcctgtgaccaagtcccctcccgacatgggctccaccacatcacacccatgctatgggccgggcccccactcagtgtcactgggggcactggggggtttgctgcttctgcagggccagtgtcctggggctggatctgggccccaacaggattcccctgcacgtgggcagaggctggtgcagctagagcatcacctggaggcccgtggcagatagaatgctgccagctcaaagcaccagccgtcggggcagcgtgtttgccagggaagctgtaacaaagtgccaccggctactggcttaaggggcagacacggtcccacagtcctggaggctggaagtccaagaccaaggtgtcagcaggggccgggggcactggctgatgcctgtgatctcagcactttgggaggctgtggtgggaggaggatctctggagtccaggagttcgagaccagcctgggcaacatagcaagcccttgtatcttaaaaaaataaaagatgatgaggtgttgtcagcaggagtggctccttctgaggctgtccaggaagatctgttcccggcctctctcctgggcttggagcggccgtcctcatcttcacacactgttctccttctatgtgggtccaaatgttccttttcataaggacatcgggcacactggattggggcccactgtaatggccttatcttaacccagtgacctctgtaaggaccctgtctccaaagaaggtcacatctggagttcctgggggttgcgactccagtgtatcttttttggggtcacaacacagcccctgacagtgtgtatgttggggtcctcctgcctcccatgaggacttgttcccattttactgatgggaagtcgagacttcagagctgaagtgaccagctcggcctcccggaacttgccatgtgccagctggggctgcctgtggctccctgtcctctctggcttctgtgtggagctctgggaacagcaacagctgaagctgctaacttcctgtggctccagcagctggcccgtgctgcccgtggagaacttatgaagtggtctggtgttacctgcattttacagatggggaaatggaggctcagagaggtgaagtggctgggccaaggtcacacagctcctaagtggtgggttctttttttttttttttttttcggagacagaatcttcgctctgtcgcgcaggctggagtgcagtggcgcgagctcggctcactgcaacctccgcctcccgggttcaaatgattctcctgcctcagcctcctgagtagctgggattacaggcacctgccaccatgcccagctaatttttctgtttttagtacaggcagggtttcaccgtgtgggccaggctggtctcgaactcctgacctcgggtgatgcccccccccccccccgtctcggcctcccagagtgctgggattacaggcatgagccactgtgcctggctgctaagtgatgggttcttgactgcaggccagcagggcctccgtggcgtcttgggccgggaggcagatgctggtgtgttcgggggttcccagctcacccacctctgcccacagctccctacaccatcatcaccttccccttcctgtttgctgtgatgttcggggatgtgggccacgggctgctcatgttcctgttcgccctggccatggtccttgcggagaaccgaccggctgtgaaggccgcgcagaacgaggtgaggggcggggctggggtcctgatgagggtagcagggccaggcagcccctcaccacaccactgcccccccagatctggcagactttcttcaggggccgctacctgctcctgcttatgggcctgttctccatctacaccggcttcatctacaacgagtgcttcagtcgcgccaccagcatcttcccctcgggctggagtgtggccgccatggccaaccagtctggctggaggtgaggcccgggccccagcccggctgggggccccgcagcacccgcagccctgaccgccctcccctgcgttgccgcagtgatgcattcctggcccagcacacgatgcttaccctggatcccaacgtcaccggtgtcttcctgggaccctacccctttggcatcgatcctgtgagtcctgggatggagtgtccgtgggtggtgaaggcagctgggagtgggggctggggctcccctcggttcagccgtcctgcagcgctgtcgctgagcactcctgtgtgccaggccctttcctcagcacaagaggcagacaagcctcctgccctgcggagcctgcatcacagtcccctgagtgtgcggaggcaaagcgagaccagccaggaaccagtctcctgagtgtgcagaggcaaagcgagactggacaggaaccagcctgcagcttgcactgtgccaagcactgttcccaaccctctgtggaagtgattttcttttttcttttttttatttttggatatagagtctcattctgttgcccaggctggagtgcagtggtgtgatcttggctcactgcaacctccatctcccgggttcaagcgattcccctgcttcagcctcctgagtagctgggattacaggcgcccgccaccatgcctggctaatttctgtatttttagtagagacagggtttcaccatgttggctaggctggtctcgaactcctgacctcatgtgatccacctgcttcagcctctcgaagtgctgggattacaggcgtgagtcaccgcgcccagcctgattttctatttgaacctcgtaacaaccccgtgggcctcacattagtagtgtcctcacctaaagaagagactgaggcacagaggtcatgcccaaggtcacccaggctggcaccgtggcagctggcccatctgcgctctgttgcccctcggtgggtgggtgatggatgaggctgcaggctccgagggggaaaacagggtggtgagagagtgactcgggccggggacttcctggcagtgatggcgagggagcccctgagtccagcccacccctgctgccaccctagatttggagcctggctgccaaccacttgagcttcctcaactccttcaagatgaagatgtccgtcatcctgggcgtcgtgcacatggcctttggggtggtcctcggagtcttcaaccacgtgtgagggccaaggctgcccgggggacgggaggctggcaggccagagtgggccccagtgagcacacctccctcttgcccgccaggcactttggccagaggcaccggctgctgctggagacgctgccggagctcaccttcctgctgggactcttcggttacctcgtgttcctagtcatctacaagtggctgtgtgtctgggctgccagggccgcctcggcccccagcatcctcatccacttcatcaacatgttcctcttctcccacagccccagcaacaggctgctctacccccggcaggtgggctgcggctggtgggggccgggctcacacggcctcatggggaccccgcggtcacagggccactgggagctgcaagatcctcgtccgagaaacggggatgcaggccccgggccgtgcagacagggccgtcagaggtgatggtgtgcatctttagcaggtggcacaactggcactgggaaccgggggtcccttccctcaggagtccttatggaggcagaccctcacccagtgagggcacggagcccccgggggccctggagggaggagcgaccgcaggctctctgggccccgtgactgctgtgactcaggttcctttgcaggtgtgcacagcagggacgccctgactctcgccctctccctggcaggaggtggtccaggccacgctggtggtcctggccttggccatggtgcccatcctgctgcttggcacacccctgcacctgctgcaccgccaccgccgccgcctgcggaggaggcccgctgaccgacaggtgggaccggggcctaaggtgtggggggctgcttgcggggagaggccactgtccggtgtgtccctgactcctcgcttcctgacagactcctgagtggccaggagcaggcctggcgggtggtgggggacctcctggggctggagtgctgccaacactgcctgctcatgccccaggaggaaaacaaggccgggttgctggacctgcctgacgcatctgtgaatggctggagctccgatgaggaaaaggcagggggcctggatgatgaagaggaggccgaggtgggtgcagtgccttcctgggggtgggacggctgaggccctgccggccctcactgcacccgccccgcagctcgtcccctccgaggtgctcatgcaccaggccatccacaccatcgagttctgcctgggctgcgtctccaacaccgcctcctacctgcgcctgtgggccctgagcctggcccacgcccgtgagtgacctggccaccgacggctggccccagctcctggcttctcacataccgctgctggctgggcgggttgcttctctctgggcctcagtttcccctctgtaaagtgggactgtccaaggaggtccctcgctggccccccgtgcagggagggcttcaggctgcggcaggtaggtagggggctggcaggcacccacttgccgttggcccccactgtctcctttgcttgcagagctgtccgaggttctgtgggccatggtgatgcgcataggcctgggcctgggccgggaggtgggcgtggcggctgtggtgctggtccccatctttgccgcctttgccgtgatgaccgtggctatcctgctggtgatggagggactctcagccttcctgcacgccctgcggctgcactggtgagcgaccacccactggcctgggctgctcaaggcgtgagttcccctcaccaacccctctgcttctcacccccagggtggaattccagaacaagttctactcaggcacgggctacaagctgagtcccttcaccttcgctgccacagatgactagggcccactgcaggtcctgccagacctccttcctgacctctgaggcaggagaggaataaagacggtccgccctggcagtgatgtctcgtctctcttccctcctttttagctgaggcaggtggcagggtagaaggcatggtgtaggatctgggacctcaaaagtcaaggcctggacctgagcagatctgcaataatgtcagactcttggggtgaaaaggggcagaaaagggccaaggagagatgtttccagcacattctaacttggagtgagcaaatgtcttcccaggccgggtcaggggagtgagctccccatccttggaggtgtgcacctggctgtgagcgggtgtctgggttactctctgttgggagtggtgccaatatccatgccctggtgccgggcctcaggggtctggaagtacagagcagtgtggggcacctgagccccggccagtgctccatgcagggccatggtgtcacacgcccaaggccacacacctgccaggaagggtagaggctgtccccagcagcagacattacccaggaccccggggttcagaacaggggctgagcctgactccaggcccagcctcccctcacctgagactacagtcttcctgatccctcccaggtggtccttcctgcgttgctggcagaatgggggtggctttctgcagttccctctggcctgggtcccacccccactgggaggcagaggaagtgcttcccagaagccaacaagctgcaaagtggttcttcccacagctgtggctgaggccagctgctgggaggagcctgtccattggctcctggactgctttgctcaggacctctggatgccaggggtcgtatcaggggctctaaggtaattccacatgcccagcagattcagcttagagaaacggtgctcacagtgctggggtaggagcagagaaggctaaatgaaggactccggagagctgcaggtggatctggaccaaatccagaacccaacgccttactccctcctggggagagagctgggcagagacttggggcgggcagtgaggtggggataggtgagcagcactcgtggtgagtggccccagtgtgatttaggaggggtgcagtgtgggatcccagggacatgaccagtcagccccgccctggctttgacatgggggtgcctggcagtggtggctagagaagtccagtttgccaagagaatggcacataaggcactggggtgggcacctctggggcatggacatagggagacatagggatggggtgggtcacctgcgtggaggactgggcactgaacagcacaggcccgagcccatccttgtccacgtgagcttatggcctgatgtagagaccaccaggggctccaggaaagttaagctgcatggagagaaacgatgggccagggccgggcccagggtggtttagggaatggcagtgtcctgggtagaataggaaggcctgagactgtgactgagctgacagtggggcaaagtgaaggagcccagtattggaagatcggctccacatgtatctctgcgaggagactgcaagcgagctcgtgtggaccaggcagaggcgagggctgagtgaggccagcagtggcctgggcacaggaagacggtgagtgagaagccactggagctcctgtgcaggagcgcaacacctttactgcttcattcagtttggcttcacctgcttaaaactgtaactctctagaaggctgaacagcaaaagcctccctcctgcccagccgctcagcatccccaggcaccagcactgctcccagtctccaacgtcctccagggctcttcgcttctgggctagaagcagggaaaccagagtgtgctggggaagaagaggaggaggtggaggagggctgatgatggggccacatgctgctgggatgccagctgagagcagcggagcactgctaagctaaggggctgagtgggtgcagatggagccctccgtgggctccttcaggtaccaggagccctgcctgagattcaggacacatccaagggtgacagcttgaggttgggtttttatttttttatttgtatagtacaatctctgtggtagcagaaatatatgcacaaaaaacaattcaaataagagttcagagtaaaaaaaagtcagctaagactgtatcccgcaggacatttcatatatatggatttcacagctacactcgatccacgccccacaccacatacaggctgctgtctcccacaagaatgatgatgtcaggggcatcaggaaaggtaagggccgggaaaccgggcccttggagaaccctgcccaggggaggcccagcctactcacaggatccgacactccaggcagagcagagggcaggagaggcccaaagagctaggtcaagcagctggctcccctgggaggggagccgggagacagggaggtcctcacactgcccccgtggccacgcatggctgtctgcacactccatcaggaggaagggcaggggagaagtcacatgcagtacagtgaaactcatcagtgtcacacacgcccagcaggaggggagagctctgctccacacgctggcggccttggctgctccagagcaatccgctgctccagcttcagccatgggaccaagagggtaaaggagcagcttctggaggccccaggcagaggccaccttgcagcagtgactggcgactttgcagtacatctctgctcacttgctgtcccttgggagtgagcaccgtctataacacatcgccatctacaaaagcctggtcacagtgttcaccagcacattcatgaaaatttaaatcaacattaaccaaagtacctgcaagtaacactgcttactcttgctgtttgcctcatctgactggaaaccttagcccccaaatatgaaatgccttctctagattaaaaggattcagagatgttgcactattgcactatatttctgcttcccgatctcgtttctgagtcctagtgaaatcgtaaacaagagatgaaataaacgtcgctccattttaataccgtctttagtatcatacacatgtgttcagtagtgagccacccaaagcctcctgccacaggagcagtagtcgaagcacagaggggaccccgctctgctgcctccccatgcagtccagtgatgaggtggatggagtcctccccacagtcacaccccaagcttcctcttctggtggaaataggcatcaaaccttgcttgggcgtagtcctaggagacagcaaagagaaggcctcagcaaggaatcctgctggcctgaaccctgcccatgtgtcccccaatccccaccccaggcaagagctgagggcacggacccatgagaccaaaagcacaggactggcctgtgcagcagggctgctcgggggcctcgctgctctacaggtgcaggctcctcaagctcccagcccaccccacacaccttcattctcaggaggcctggtttataggcatgggccagcccagccctgcctctcaggatgaacgtctcatccacatgcttagcactgctaccattcatcaccttgctaaccctgggtgctgtgggcactgactgaccgacataacacaccttttagagcaaaagacccctgggacacaggcgagtctagaacagaaggggagaagaggatgcccatcgcctatttcccgggatctcctgcagcatgacttttaagaaggacactgagaggcaagggagaaaacccggcttggtgttctgtttctgccactatttttctgggattgtgttgtgtgaggacaacacaatctcaaagacccactcctaatctaaaagtctgcaattctagaagccaggaagattacaattaacttttttgaaaaattaactgagctgtaatttctactctacaagcatgagcccattttaagtgtccagttgagggccttcacagatgcatccagccagttctccaccaccgcagtcaggagacctgtgtttccagcatccctacaagctcccatgggcctcttgcagttggccacaggcagccaccgactcaatatctgtcactatggactggacttttctttcctagagtagcacataaatgccactatacaatatgcagcctcgtgtctggcttctcactcagcgtgctgtctctgagtggcctgtgctgtcatgcactggtgccaccttccttttgcactgccgagtgttctcagtacacggatctggcactgtcgtatccacacacctgctgactggcatttaggctgcttccagtttgggacgattataaatgaaggtgcagaccgggcgaggtggctcacacctgtaatcccaacactttggaaggccaaggcagacggatcacttgaggtcaggagtttgagaccagactggtcaacacggcgaaaccccctctactaaaaataaaaaattagctgggtgcggtggcgggcgcctgtaatcccagctactcaagaggctgaggcaggagaattgcttgaacccgggaggcggaggttgcagtgagccaagatcgggccactgtactcctcctgcctgggcaacagagtgagactctgtctcaaaaacagacaaacaaatgaagctgctatgagtgtttgagtgcaagtcttggtgtggaatttgttttcatttgttctggaaaaattccccaggagggctgctgggtggtctaacccatcttcacactggctgtcgcgactgcattcccagcagcagcgcatgcgcattcccattgctccatgtgctcgccatttgggaccgtcagttctttcaagttttagccatcactgtgggtgtgtagggtatcgcaatgaggctttgattcacatttctttaatgactaattatacaaaacacatgaaaagattcttactggccatgtgtttctcttaagtgtccaaatcttccatccatttataaagcaggctgaggccgggcgcggtggctcatgcctgtaatcctagcactttgggaggccaaggcgggtggatcacctgaggtcaggagttcgagaccagcctgaccaacacaaagaaaccccgtctctacttaaaaaaaaaaaaaaattagccaggcatggtggtgggctcctgtaatcccagctacttgggaggctgaggcaggagagtcgtttgaacccagaaggcagaggttgtggtgagccgagatcgcaccattgaactccagcctgcgcaacaagagcgaaactccatctcaaaataataataatgaagcaggctgtttggtttctggctgagttatgagttctttatatatcctaaatatgagtcctttattaaatatacatttgtagtatttcctcccagtctgtggcttgccttttcattttctccatgatatcgttcagagttactcattttgataaagtccaactgtgatgacatatatgtgtgtttttgtccagggtccctggctcataactcccatagcccttactacagtaaacagaatctctctctctgaccttctgccgtcctttcacctgcccaaagctagactctaatctgactgtgggtcataagactcttattccagagggggtcctgcaccataccctgggataaggaatgctgtacagagaagcccgaagaacctggtcaggtcttgctaggtttagatcacaccttttttgtccaatcacatttcaacacggttgtccacatttcaatcatgcctatccaatgacatctccataaaatgcccaagaggacagggtttggggagtttctagagaactgaatgtggaggctgacaggaaggtgaacaagaatgagttccccaacccacccacagggacagaagctcctgtgctgggaatcctttcagacctcaccccacctatttatctcttcacccttaaaataccctttgttagctaggcatggtggcggaatgtctgtagtcccagctacttggaaggttgagacaagaggatcgcttgagcccagaagttggagaccagcctgggcaacacagtgagaccctgtcttaaaaaaaaaaaagtaatacactggtaaacttacgtgtttccctgagttctgtgagctgctctagcaaattaattgaacccgaggggaacgtgggaactccaatatatggctagttggtcagaaattccagaggcctggacttgcaactggtgttggaagtggggggcagtcttaaggtctcaaccctcaacctgtggggtctgactctgtccccacgtagacagtgtcgtaatggaattggagggcacccatctggtgtccactccagaactgattacttgtttgttggcggggagaaccacccctgacgtggtcactttagtcttctgtggtgatgattgttgctgatgaaaggaatgggaaaaagcactttggtttttatgtgtttcctgctcacagcaacttactctattttttcctcttttatggctagtgctttatgtaacccaagaaatctgtgcttaggtcagtaagcttttctttttttcttttttgagacggagtctcattctgtcgcccaggccagagtgcagtggcatgatctcggctcaatgcaagctccacctcccgagttcacaccattctcctgcctcagcctctccagtagctgggactacaggcacctgccaccaggcccggctaattttttgtatttttagtagagacaaggtttcaccgtgttagccaggatggtctcaatctcctgacctcgtgatccaccagcctcggcctcccaaagtgctgggattacaggcgtgagccaccgcgaccagtctaggtcactaagcttttctcttgtgttttctcatagaaacttaatagttttagccttcacatttaggtctattatctgtttcaagttgactgttgtttatggcacagaatcaggttcagttttttctccacatgactcttcaaatgttcttgcatcattttttgaaaatacaatcctttccctcttaaattaccttggcctttctgttgagtaccaggtgattatatacacatggatcaatttctggacactgtattctgttccatctgatttgttttttgttttgttttgtttttgagatggggtcttgctctgttgcccaggctggagtgcagtggtgtgatcacagctcccctgacttcccaggctaaagtgatcttcccagctcagcctcccgcgcagctgggactacaggcatgtgctacagacacccagctaattgtttcgtattttttgtagagatgagtcttgctatgctgcccaggctggtttccaactcctgggctctagcgattctcctgcctcagcctcccaaagtgctggatgactggcttgagccaccacacctggatgatttacattacttatgccaccaccacactgccttgacttctgtgcttcagagaagtcttataaccaggtagtagaagtcttctttgttcttttacaaaattattttggttattccagactctttgcattttcatataaatttcaggatcagcatgtcaatttctacacagaagcctgtgggggttttgattaggcctgtggggaatgtacaggtcagtgtggggagaatgagcatctttaccttaaggcttccatccatcaaggtggtatcttctccatttatttcacttctttattttttacactctttcatagtttccaatgtacatatcttacactattaaacatttttccatgtacagttgtttctaccatgtagaaatccaactgatttttgtatactgaccttgtatcttgtgactttgataaactcattcattaggttaagcaacttttctgttgattcctttattattttaaaagcacacaatcatgtcacctaaagaataaaggcagtgtttcttcttccttcccagtgcacctatatttcctttctttgtcttgcctcactgcaccagctaggagcttcagtacaacacagaagacatgcagtgagaacaggcgtccttgcatgttctgtacttggggtgggggtcaaaggggacattttccctgttaccactagtgataatgttggctgtgggttttcctttttttttattgagacagagttttgctcttgttgcccaggctggagtgcagtggcgtgatctcggctcactgcaacctccacctcctgggttcaagcgattctcctgcctcagtttcctgagtagctgggattacaggcatgtgccaccacccctggctaattctgtattttagtagagacggggtttctccgtgttagtcaggctggtctcgaactcccgacctcaggtgatccacctgccctggcctcccaaagtgttgggattacaggcatgagccaccgcgcctggctggctgagggtttttcatacatgcctttatctggctgaggaagatcccctctagtcctagtttgctgagatttttttttatcacattggatcttgtcaaatgctttttcctgtggtccctgagataatcatacggtttttcaccttcattctgttaatatgaagaattatatgaactgattttttcaaatataaaccagccttgcattccagggataaatgccacttgaccataatatattatccttttacatatgttagtggatttaatttttgccaatgttttgatagggattttgtgtaatgtttcttcttatggaatataaacatttaagctacaaagccgtaagtttctagatactgctttatgtatatcccacaaatactgacatgctatgttttcattataattcagtttaaaatattttctcattttctttttaatttctttgacccagggtttatttagaagtgtactgtttaatttccaaataattgagaattttctagctatcttttgttgttgatttccacttaaatttcactgagaacatatccagtattatttcaatccctttgaatttatcaagacctgtctgatgggccagcatatggtctatcttgaggaatattccatattcatttgaaaagaatgtgcaccctgcagttgctggggggtttaatgaacatgcatgaggccaggctggcagggagagttgtaaggccctatccctccttctgcgtgtgttcctcctttgttctaaccacagaagaggagtggtgagatctcccatgttttttgttttgttttgtttttgtttctgagatagagtttcactcttttttttttgagacccagagtctcgctctgtcgcccaggctggagtgcagtggcgtgatctcggctcactgcaagctccgcctcctgggttcatgccattctcctgcctcagcctcccgagttagctgggactacaggcacccaccaacaggcccagctaatttttttttttgtatttttagtagagacggggtttcaccgtgtttgccaggatggtctcgatctcctgacctcgtgatccgcccgcctcggcctcccaaagttctgggattacaggcatgggccaccgcacccggccagagtttcattcttattgtccaggctggagtgcaatggcgccatctcggctcactgcaaactctgcctcccaggttcaagcgattctcctgcctcagcctccctaagtacctgggattacaggcatgtgccaccatgcccagctaatttttgtatttttagtagagatagagtttcaccatattggttaggctggtctcaaactcctgacctcaagtgatccaaccacctcggcctcccaaagtgctgggattacaggcgtgagccactgcaaccggccgagatcaccaactttaatcgtgaatctgccattttcttctttcacttttgtcagttttaatatcatgtcttttgaagcaagacaagggtttttaatgtcctctggatgtactgatgcctttattatcacaaaatgcccttctttatctctagtaatattccttgttacgaagtgtgctttgtcgtacagtatcatttgaccatgactcaaatctgctttaaaaatccaatgtccccttcttttacctaatatcatccttgcattaccaaaccttctgcctagaagtagaaatcattgtagtataagactgaggaggtcaaaatgaactagtcccatccctgtcccaaaggaaggcagctcaccagactgtggacatttgtgttatcccccaccccaagacaactcaccaacattcattcactatggaacaacagaaaggtttgtctgaaggttaaaaatactttctatttctatgtcagtgacagtttttttttttttttttttttttttttttgagacagaatcttgttctgtcacccaggctggagtgcagtggcatgatttcagctcactgcaacctccacctcctgggttcaagcggttctcctgcctcagcctcttgagtagctgggattacaggcgcccgccaccatgcatgctaattttggtatttttagtagagatggggtttccccacgttggccaggatggtctcgaactcctgacctcaggtgatctgcccacctcagcctcccgaagtgctgggattacaggcgtgagccaccgtacccggctgacaattcttaaggttaaaattaaatgacagcctagcttggttacaaacatgcctatgaaaaacaggaggtctaattcaataattaccagcttccaacccaaagtcgggcactacaggctggagaatgaagtggtaaccgataaataaaaccttccacagcacaggcaggagccacccactcttcttcacttactgtcccgtgtcagaagggactgaggtcagagctggacttcgagggtgcagatgcctacattccccatcaggattgcaggcacttctctgaagcaggggaggcaaggtcagctggcctggaagtgagggcaacctccaaaggcaaccacagcatcagtgacagcggcttctcccccggcttcctgggctgagccacactgtcctgatgccaccaggtcaccacattcgggtacttggggagacagagaaccctctgtaaggaacagtcatttgctgccaacattcacaaatactatagcatttttacctgggagtaggaagaaaaaaaaaaacaaaaacgctgctaaaacataccatgtacccaaattcaatagatgaaatcttggcttgtacaatggaccacagtccccagaggaaatgagatgcaagggcaaacctggaatgataaaagcaagaaacatataagagacatacagtatcagttacaggactgatgaaatgatttcatgccagatggacattttaacttgtgtggatgcaaacctagttagtgttggcaaatcatgggtctatattccacgggactaactaagaacaatgggaataccactcccacacccttccctcatctgctagtgacaggtgcactggtgagtgtgaacacacacagctggcctggccatggcacacgtaaatgccacttggccataatatattcacaaggtgaatatattcacattcacagggtgcaggtgaaggcctgggtggccatgctggcagaaaagaaagcaagcttgctacaagggagggtgcacaccatagcaaccaagaggcagccctttgctggaggcgggatgaagctctcactccttgagcaagagaattctcaaatcccatccttgtcccatcccctcctgtcacacagaagtgaaaagagcagatcagagagcgtgagccacgtcaccatctctaagctgtaccaagcccccaagtcactgtgaatccaagttcctcctcaaacaataccctgagggctcatccacatgaagataaagctcaaatttaggagtgcctgctctagtatcctccaaccctactctctgttcatcctgtggtccccggcccacaagagtcccgtgtgctaccctttctgtctgggttctcctccatctgtttttttctatttccaccagttcaagaaacagaaagagatgatgtatgctgcggtgaagcccagcaggtaggcaggtgtgacatcacacttagtgttgggggtgagcactctggaggccacgaggagatgactgtgctaagtgcgtggaaagatgaggggccacagtgacttaaacagccattctaccaaaaaatgtcacaggagaccccaaataataggaacaacccacaggcctcttgactaaagagatggacaaatagtggtctagacctttgcacaatctggaagtttcagggccctgctttgaaaactgttgagaaaacagttaaaagcaagacttaaaaccgataaacataagtttaatcattttctaggagaaacttaagagttaaaacacagcatatggtggccgccactccagaagcatcagtgacaagtttgcagggacagatgcagtagcccacatctgtaatcctagcactttggggggccaaggcaggagaaccacttgagcccaggagttcatgaccagcctgggcaacagagcaagacctcgtgtctacaaaaaaatacaaaaattagccaggcatggtggtacgtgcctgtagtcccagttacttgggaggctgaggcaagaggcttgctaagagttagaggctgcagtgagccatgatcgcatagctgcactccagcttgggtgacagatcaagactccatctcaaaaaaaaaaaaaattctataggctctgggtggcagcagccctgtatggctgggttgttgtgtctggatgacagttcagaatgccacaaagtgtcctgacccttcttggacatgggaactcttcttgtgatatggtttggctctgtctccccacccaaatctcatctttaattgtaatccccatgtgtggagggagggacctggcaggaggtgattagatcatgggggtagtttcccccatgctgtcctcacaatagtgagggagttctcacaagatctgatggttttacaagtatttggtagtcctaccttcttctctatctctctgcccctctctctcctggcgccatgtaagatgtgccttgcttcccctttgccttctgctatgattgttaagtttcctgaggcctccctggccatgcagaactgtgagtcaattaaaactcctttctttataaattacccagtctcaggtaatatctttgtagccatgtgagaacagactaatatactttgcctgctgtatgctcagatctgaaagctctgcatagtctcggccacaatggagaagtagcagattctatttttgacaaagtgcaagtcctaaagatgtacgattaaaaagaagctcctaggccaggcgcagtggctcacatctgtaatcccagcatgggaaggccgagctgggtggatcactggaggtcaggagttcaagactagcctggccaacatggcaaaaacccatctctactaaaaaatacaaaaattagctggacatggtggcaggcacctgtaatcccagctacttgggaagctgagacaggagaattgcttgaacccgggaggcggaggttgcagtgagccgagattgcgccactgcactccagcctgggtgacagagcaagactctgtctcaaaaaaaaaaaaagaagaagaagctctaaaatactcctaattgcaagtcagcatctcccaaatatagtctataaagaggaaagctatctttacaaatcaaaaaaggaaaaatgttacctattaacttcaagcaacatttcttcttttataatggatttttcttcagtactgaggttttcaaagtcattttggaatgcaggcaagtaactggaaataaaatggagcttaaaaaaaagtaattgtgttaggatcaatgatggttaaaatagacaatgtcaatagctgtcactaagcatatgcatctactgtgacacactgggagacacacactcaacatgatgttcagcatctccgacatcctggggctggcaccagtgagccaacctttgctaggttttcagccgctctctctccccaggatttctagtggagatacagtgtctaggctcttcagcatactttttccatttagagtagcacttaaaacataaactggagaccactattttggaggcaggcttggtgcaccctcccaatcctactcagcttcagcaccgctaccaaggtttcagtgctgggctgaggaatgggagagaaagatctcaggaggaaattcccatgagaactgattctccacacaatcaccagcctcctcccatcattcaggacaggaaagggaactgttaacaccaaagatatttcctcccactactaaaccctggtgcccgaaagattacttctctctccatagtgtgaaatgaatagaaaaaggtcagtgatcaccaaaaagatggccagaaagcagaatcaaggctgggcttttcaaaaaaatactacaaggaactacaaaggatgacaaagctcttctctgaatacaagtatctctggcacagagatttttaataagctggactaaaaggtcaagtttgtgtctacatttaacaggaacaaaataacattttttaacataaaccaaattttaaaaggttatctttaaaaatgaagatgtaggccaggcatggtggctcacaactgtaatcccagcagtttgggaggctgaggcaggaggatcacttgagcccaggagtttgagaccagcctgggcaacttggtgaaatcccatctctacaaaaaatacaaacaattagctgggcgtggtggcatgcgtctgtggtcccagctacttggggggctgaggcgagaggatcacctgagcacagaaggtcaagggtacagtgagccatgatcgcactactgcactccagcctgggaaacagagtgagaccctgcctcaaaaaataaaaaagaagatgtaattctaactgcatgaaattgacatgtaattttcctatcaagtatacaaaaactcatctcctacctgttgtttcttggtgggatacttccggatgtttgctctgaaaaaagggtatttttcatagctataatcatacatccactcacagaagtgatttccaatgtcgaatcccctgaaataagacataagacagtgcacacaatgaggcaaaccgtatgcctggaggctccctgactgcagaagaaagaaaggctgagttccgagcacgccactcctgttgccatctggacttgctgagggagcaggactgtagctgctttaatgacagagagagacaacaggtggttgatcagcatcacagctgactaaagctatacaggtgcacctgaaccactactccagaacattgtgtctcctagaccaggatttatgagaagaaaatgacctctgaagccaaaagaaaatgccaaagtctggactgaatggcatggctgtccccaactagcgctgtctgctaggaacaaagaaggctgtgctgcttcaccacaaccatcaccggccactggacgagaagccactgattccaggtgaagcagcttgcaactcagagcggcattttgacttattttctctaataactgttaattaagcatatcgtaatgataaatcaatattgagatggaaacactggactgtaacacagtacctgtaattgtaactgctgtattcgaaatcaatgagcatcagtttctgtttttcagaattctctcggccttccagcaacaagatattacctgcaaaaggtttggataacatggtttatgttttacaatagaaggctcaagtccttgaacagcagagccgagagaatggatttgatcccttagggaatcctaactgaatgtggcttttggtctgtggacatcaccagggcctagacagagcgtagaagtgctcacgggaggcataaccctatgcagggtggctcctgacccacctggccatgagaacccctgctcacagccctagtcctcgccagacccccaggatcactgtggaacaaagcctggcctcttgctctgctgtcaggacagtacttcccaaatgttctgcatggtggcatgcaggagctcgtgctagccaaacaccaccctcagcagccctgggacttggtttgctgtctgcaggccagctggctgcagcactccagctgggaagctgtgggagtgccctcctggtaagaaaggcaagggagagctcagctgccacaggggatcccctgctttgttcttgcctgcttttccttcccaaggagaccacaggcagcattcctacaagactatttgctttagtattggattctgggtcaggagttggtcagccatcagcctggctctgcaggcctgcgttcctgagatccccacactcgacatgatgttcagcatctccgacatcctgctgctggcaccagtgagccaaccttcgctaggttttcagcagctctctctccttaggatttctagtggaggtatagtgtctaggctcttcagcatactttttccatttagagtagcaattacaatgtaaactggagaccagaaaacgtgtattggctcacacttgtaatcacagcactttgggaggtggaggtgggaggatcacttaagtccaggagtttaagaccagcctgggcaacacagagaaactccatctccacaaataattagccaggtgtagtggtgtgcgcctgtgatcccaactactcaggaggctaaggcaggaggatcacttaagcccaacaggctaaggttacgtggagcctagactgcactactgcacaccagcctgggtgacacagtaacagtctcaaaaaaaaggcaaattggaggcagacgcccaaagtagcacaacaaaattaatgtacaactgttacctcttcgatccttcctacactttgccatcatcaacacagccgatctcctccagtcccctctctctagtgatgtctgtgccatttatcaccccctcaccaccagaagggcaagggtaatacacaaagctgtagctgtaatgtctacaccctccttgagttagccagcgatgagcagctaattagtaaaaggtaatttggctcaaatgaatggcttatggatgacgagtcttcatgagaaactgttctcaggattaaaagcaaactgctgagcctggcaaacaagggctcaaggtgggacctgaactactgtgactaggggaggcaaggtcaaggcagagagaggccatgtcagcagcaccagtgggagctgcatagtggggggcctctgatgagactgttcaatgtgcaattgcatgggatgaagttttgttacagtaaggaacatatcactgtcatgttttcaaagcagagaagcccgaaataattaatagcacagtgcactgatactaggagaggaggtgttaggattacacgtgttgcgataagcaacactacgctgtgtggtgcagaagggggaagggcccgggactcaatggggtaggcagtggatcttgttcttttattgctttttcaggttaaaaaaaaatcatacatgtttactgtaaggagttaaacactgaaaaagtaatatgtgacttagaaagtttaagttcttcatcccagttcccaagtttagtgaatattctttcggatttcttccatgtaattttttttttttttttaacaggatcttgctctgtcatccaggctacagtacagtggtgcgatcacagcatactatagccttgaactcctaggctcaagccatcctcctgcctcagcttaccaagtagctgggactacaggtgcacactactatacctggctaatgtttttattttttgtagagatggggtcttgctatgttgcccaggctggtctagaactcctgggctcaagcaatcctcccaccttggcctcccaaagtgctgggattacagacatgagacattgtgactggcctcatactctataaaaataatacaaaacctcattgtctggttgtatcatactttaatgtacctaatactcttgatgctaccttacatttttcagacacactgccagtaattttctaagtatgcacacaaacctcatctgtaacagaacatagcaattcttaccttcttgacagtcattatgacaaaatacaactggagatggagtagattcaagcaatgatctgaaaagaaaggtttcactgttacccatcacgcttctcagtcagctgcacacagtcttgctttctccacatggccagcaccaaattcgtgctccaaagcaacacacagtttcagagtagtatctgtgatgtgaattctgacaactgcgtcattacgtggcaacaactccacaggccctctgcactcagctcttcccccggaggacctctgcatgtgccgctccctcctggagcccctttctctgctggtctcggcttgtatagcacccccttagacagcccttctcttaccagtgacccaagcaggtcctcctatgcagactaagggcctactttgatctgtttctgtcacagcacttatcacaatttgacattattttatttgtttacttgttttccctcagcagcgatcatcaagcctagcagaggaggcacaaacctgagtaattaaaggtgtaaatacttgtggctgggtgtggtggctcgcgcctgtaatcctagcactttgggaggccgaggtgggccgatcacgaggtcaagagatcaagaccactctggccaacatggtgtaaccccatctccacaaaaatacaaaaattagctgggtgtgggggcgcatgcctgtagttccagctactcgggaggctgaggcaggagaatcacttgaacccaggagggtgaagctgcagtgagtcaagatcgcgccactgcactccagcctggcaacaaagcgagactccgtcttataaaaaaaaaaaaaaaaggtgtaaatacttgttagtgtacagatgtgagtggcctgcgccaagcatcactctgaggacaatgacggccttgcttcagagatcagtatgaagactctgtttctcgcaaaagccaaggttgaactgtaaggaagaaggatcttcctcacactccccagcctgcccttactcccttctccccaccagagaaaatccaccccaccagacactctactgccctggccaccaagccactcctttgacattttccttctcaatggaaccttcacaaactgaccagaggccacgtgtgggcttctagtccatagagtccataatctctagtcctctagagaaccataattccagatgacaaaacttatggtttaaattcatcctgtaaaaccaatgtaaaatgccagacataaggcaagctcaatcaatgtttactgacaacagttttagtgactaagaatatttaaagtcaggaaatagaaggaaaactcacctcaggttttccagttccaagggcagattgtaactgagcaatttgtggagctttttaattctggattcctcagtaaatttaattctcagcacttcctttagatacctattaaaaaattttcaaaaaagaacagaacaaagaatcaccgatcaattcaccaaggcttgctgttcttggggctttggttaaacattcaatcccagcgcagtcacaatgccagtgggacccctctgactgccatgactgaggggaagaggagtggccttgggggttcgtggcattctaggaaggtgactttcttctgtcccttcacccgttcaatagcatttttgcataagccttctttcctggtttaggaattgacttttacacacaagaaagacttacttatgagacaagtatcaccagctgacaccctgcacttcagtgaactaggaagacctctgactactgtggcaaacaaatgctcacttatggtacttctgggagccaccactgtaaaactatgttaggaccaagtgatttgaccacttacttttccattgtgccaaaaagccattttggttccttattgaatggcattttcataccatgaaatgtagccattttctcggcgatttctgcagaaatatctggcaaacttaattcttcagtatctaatcgccggctctgaaaaagaaaagggagttaaaaactgacatttaccaagtaaactaaaaagagtgagatcacacagtcttaggaacgagaagtgtttttgtagtgcatttaagtctcacccaatgccccaaattcccttaagaatggacactgtgtccctacagacagtgacccagcaattgctatggcatttctacagtgaggagccggccacctccaaagatctatttcattttgaaccctttttaactatgagaactccttccttaaattttattgaactactacactatcatctattattctggcctctaaaaccacactgaatgtctattcactacccaatgctgaagtccatgtcttcagcagtttatcacatggccccacttccagctcctccatcagctgggacattctactctgatgtgttgcaggtgagatgtggggtccagaataggtcctaaccaggagatgcgtcacagagacaggggggccgtctccagctgctcccagtggtggtgtcagcacctggcctggcacagagcaggtgtccagggcaaagttgggcaaagaaacagtgtctagaggacttcctcctggcctctgcatcctgcacttcccctaaatcagcccgaggccatgcttgtttggctgcccttttacaggaggcccatgggagctcacaatcaactgagacctccagagcttcctcatgcaacctgccaccctgcagaaatctaaagagaggtttctgtgaaaatgcaaagaagtacagcacaggggtaagagtgaatgctcccaactcagggaaacctcagttgaaattgtggctttaattctcatttcaaagctacatggccatccaagttacctcatacatctgtgtgttcccatttctatcaaatgggaatcaggacatgaattctctcacagagttgccaggagagctggaggagagaatgcagatgaggtctctgggacagcacctagcccagggtgcagctcagcaagtggcagatgtctgctactgagagctaagagctcactgtaagcattggactcaaccttctattcaactccctccagaaagcactgtcaccacagcactgtcaacaaattaccatgctgcaataagaacagggcctccacttccagcagcaggacacacaggacttattaaggtagctcactcagctttcaaaactgccattaatttggcaacaaggaaaatctgaagctaacatgctcagatatgaacaaatctcagtattccaaattccttccccagtagagaaagagaaacagactacctactatccctagtggcccggctattctcacatgccctttgaaagatggctacaggaatcatgaaactaaatcacctgatcccaagcagtgaagagtaaacctaagccaggcgtggtggctcatgcctgtaatcccagcactttgggaggccaaggcgggaggactgcttgagcccaggagtttgagaccagcctgggcaacacagggagaccccgtctctacaaaaaaataaacaaaattagtcaaacatggtggcacgtgcctgtagtcccagctactcgggaggctgaggtgagaggatcacttgagcctgggaggttgaagctgcagtgagctgagatcaggccacttatacttcactatactgggcaatagagtgagaccctatcttaaaaaaaaaaaaaaaaaaaagcaaatctagaaataacatacggtattaggttgaatcaaatgaaactgccattcttgttggtcaaaaacagtcaaacaccggcggcgtcatatggttcaaacctagtatataacagaattttaaaaaaatcttcactatggctgggtgcagtggttcacacctgtaatcctggtgacttaggaggctgagacaggagaagagcttgaagccaggagagttcaagaccagccagggtaacacagcaagacccatctctacaaaaaaaaatttttaataagctgggtgtgctggtgtgcacctgtactcccagctacctgaaaggctaaggcagaaagatcacttgagtccaggagttcgaggctgcagtgagctatgatcatgctattgcactccagcctgggcaagagagtgagactcccatctcaaaaaatttaatatataataaacaatacatacaagagcatagatagaacttaagaactagaacaaaatcagttccacagatactataatctatgtgtcctgatgcctgccctttttgtccccaagatatttttattattctgaattgtgttaacacaattcccttaccttttccaaaaagagaacttttactacatgtgcacatattcttaaacaatttttaaaatttatcaggctttatagaatggtatgatactacttacagtctcctgcagtttgatcattcaacattatgtttgtaagattcacctatattgccacttataaccatatgaggttctattatttacaaaattctttcaaaaacttatcatctcggccgggcgcggtggttcacacctgtaatcccagcactttgggaggccaaggcgggtggatcacctgaggtcgggagttcgagaccagcctagccaacatggagaaaccctgtctctactaaaacatagccaggtgccagggagcaaactaaaggaaaaagccagcgcagtgaaggcaccatccactcatctaaacacatcctcagcactggcagctagcacaacactagcacagacggacagtgccactgtcaactagaagaggatacctcttctggggagacagagcacaactagcctctctgtttctgggctgtgggattagacaaagaaacccctgcccctggtccccagccagacgcagcagagcacccctctgccaggcatcctagtgctgggctccatctgcacagatgtacagggcagccctggacatgcccaggcctctcatggataagatatctcatgcagcagggcaggaaaagctagcagcttatgattctagtcctcaaggaacttacgctcaatgaaaatggggaatatctgatctatctaggaagagagtgcaggctgacaaagacgagcattgccaatcaaagaagtattgccagggctcagagccacacttcaacacttagggttcatgagaacctctgggcatgaagcattgtgcagggcatggagtcaggggtgggtgggtagaggaacaggacctatgctttagatatgtacatgtaactctaagacatggtatactggtaaatgttacagcaacattaaaactgccttgggacaataagaaagggaaaataatcctgactgcttagaaataagactgcaaggtcttggagcaaggccttgaaatctaagaatttgaccagcatatggggacaggaagatgggaggtagggagactcagtaggaatgcacaaaacaaaccaaggaagggtgatgggaaagaacaggcatggcccccacagggctacagtcagagactgagcagggccaaggtgttctagcagcaagttctataaagcagggccctagaagttgagaggaacacggtgaaaagggcaaagtctcagggtacacagcctcaggggacaataaaatggtaagtttcatatatatttcaaatttggatgaatacacctttacagaaaagaaagaggttcggatgtaagtacaaaataaatgttgcttttcatgatttctgatacagtttaatgacataggtgaggttaacagtgaaaacacagcattgcaggttcttgcagcaatgagacaaagaagccatcttctgtctgtggcatatgtcaactaagcgtttatgaacaaatcttaccgggatgaactgctccagtcggccttggggaaagatgccatagagttttggcccaagtgacctctctgcgagaatggcaaacataacgctctccagaaccatggcctcagccccctaaaacagatggcaacaaatcaggtgtttactgagtgtttgctaagcgccaggcatcagaagcactctcacaggagtgtttcatctgatcctcatgagtattctttcacgtgggcactactgttatcatcatccccattttaaatatgaagaaacagaggttccaaagtcacacatcgtgtcatttgcaggattcatgcttgcaagcactatgctatattgataagatttaaaatatgagtttaatttaggtcactagatccaaaaatagaaaaatatccatcagtgcttttattgcttctatttatttcgcaacctatataggagtctcacccttggtatctcaccaaaggccacaacaccatccattctggtaagggttgatttgcttttggttgagtgtgtctagttaaagcaaaggatccaaaggaccttctgcctactaaattgggctcatgggtccaacaagcttgaaaattactgatttaggtccagggtctacggctttctagtccaaagagcaccctagcatggagcatcctagattgctattttcagttggcacacccgaccttttcctgttattgaatgtttgttgtcttgctgaaatctctatgatgctgtctgttctatcttcgtcctaataattaacgtgggatctatcatcattttgccttcaaaatccatgctttgatctcaaagcaaattcagtccttggtctttcccccttaaacagcacattacagcataatggtttccatctgttggagtgaaggagtcacgcttacccagaggtccacctgaatctcttaaagagcttttacaggccaggcggtggctcatgcctgtaatcccaacactttgggaggctgaggtgggaggatcacttgaggccaggagttagagaccagcctgggcaacatagtgagatgccccaccaccaccgaagtctctttttaaaaaaaagagcttttgcaaagagattcctaggtcttactccaagtattaaaagagaggcaccagcagggctgttttgaaaaagctttcagatgattctaattcaccccctgtgaagcaatgtgctgtggaggaacatgatcccagagaaacctctaaaacacattcacgttaccaaaaactgagaaaccaagaggacaaacttattaggaaatgatacagtactatagtaagaagaaaacaaaaaagaaaagctacttccaaaggatatcagaccacattaaagcaaaaagtattttggtcacttttacattttgtgggggtaaatggatttgccggtaatccccccacaattatcgtctacaaccatcattcgtataatcctcacaattatggcctgtgatcttgtgaggctcaatctttcctaatttgtggttttgtgtatatgacaataaactgataacatctatctatcaagctaatgaattttagggtgggatttgatatcagacaggttttatttcttaaaaccttagagaatgaaaacaaagatctagtatctctatttagttgtcaaaaggtttccaagaactttttagtcctatggtagtgttgtccagagatgcagtccccatcttactccaagcccaacatcacagaaagtatccggggcatttaagcaagggtctgcaaagcctcctccaagtctctgcttagacattatgctcccctgctccccagggggcagcacggtcctggtgctctgaagactgtggtccccaccaccaccctcatgctgtgtaaaacacaaaagtaaacaggggctgggcatggcaggacaagggggtgctggactcggaagttcagcattttgcacatcatgtccactgggaaggattctcggaggtgactttatttacgtgtggcatcgtcaacacatgtcaccagcactagccagaatcctctccagagctgagtcaacccagaaaggacatagagaagagggaaagagatgtaagaactttccaattctctttagcactgccctaaacattgtaaacaaaaacacacttattcttacgtaatactgtagttcaatatttattcacagtaggaagaaagggggagatggtgtatggagagaaggatttggagaggaagaaaatgaggccgggtgcggtggctcacgcctgtaatcccagcatttcgggaggctgaggagggcagatcacctgaggtcaggagtttgagaccagcgtggccaacagggtgaaaccctgtctctaccaaaaaagtataaaaactatctgggcatggtggcgggcacctgtaatcccagctactcaggaggctgaggcaggagaatcgcctgaacatgggaggcagaggttgcagtgagccgagatcacaccactgcactccagcctgggtgacagagcaagactctgtctcaaaagaaaagaaaatgaaagagaacacccaggcacaagcaagaaaaatgacaggttaaggacagcagagaatcctagaataagtgtaccaactactggtggtcttcttgtcatcactatgtctccaggcaccttcctgattgctcctgaaagtgagcatggtaaaaagggggctggacagacatggctgggttctctcctgtaccacgcactggtttagccacagctggtgacagtggagggaaaattggtcctactttttcagatatctcaacttggaacaatttacttgggcttcagaaataaagactcattaatacatttgcctaaaacacacttactcaatgtctactatgtcctggcactgtgctaagcgccagggaaccaacaaagaacaagatacataaggcccctgcccacaacggggcttacatgacagagaaggagggatggggagagagagagaaatggacagtaagcaagtacacgcagctatggactgggctcactgccatgagggaaacaagggtgactggtgtggtggtgtgggtatttctaaggaggccacactgaactgacctgagatctgaggtgtgaaaagccacagcagccccatgggagcacagggccatgaggaaggaacaagtgtgacgccttcaaggaactgagaggcctgtctcactggaacaggacaatcaaggaaaaggaagagcagagcatgagattgccgggtggactggggcttacagataccaattcacaagtcctcaacatgttgttgatgtttacagctcacaaactgggttcgatcccctggggacagaagaggaggaaccagcacaggccttaaaatgccctttcttatgtgactgtcaccacagtaagaaagctttctacagggcaccctcgcatacacccccaaaacaaacactatccccacagcaatactcactctcacaactgggcaacacttattaatattttctactctatttcattttaaaaagcaatcaacatgctaacatttcatgccccactagaggttcacaagccacaacttgaaaaactggtttaagttcaggcagcaaaaagaggggccagggcagaaggcaaggtgaggcaggcgccactgccaggaaggagagtggtattccctaatggtgctgctaagtggccattagatttggcaatatggaacctgttggtgacaaaaaaaagaacagcttcagagtgatgggtggacagatgtcagattggagcatgtgaagagtgaacagaaacgggagagagaagtggttgagaatggaacaaggggtttaaactgacttttcactttatctatgaagtttcatttatttaaaacccaggaagaagagtattgatgttatgaacttcttgagaagacataacagcatttctgtggtatttcagccaaaaatgcataacctcaattgtgagaaaacactagacaagctgaaattgaggagacatttccaaaataacggatcagtactcttcacaagtataaagattacaaataacaaaagaattgttacaggctgaaaaagactaaagagaaatagccaatgcaatcttgagatctagctaaatctcgagacagaacaaaagaaaatatgcataggaaaacttctgaaattcaattcaggtcatagttcagttattattttttttttggagatattattattattattttttttttggagatggatagcccaggctggagtgcagtggcaagatctcggctcactgaagcctccgcctcctgggttcatgcgattctcctgcctcagcctcccgagtagctaggactataggcattcactaccaagcccagcttatttttgtatttttagtaaaaacagggtttcaccctgttggccaagctggtctcaaacttgtgaccccaagtgatcagctcacctcagcctcccaaagtgctgggattacagacgtttagttatcactattgcatcaacgttaatgtcctggttttgaccattgcactgtggttatgtgagatgttcgcattagggaagctgggtgaggggtgcatgggaaatctctgtactattttttttttcttttgagtcggagtttcgcactgtcgcccaggctggagtgcactggcacgatctcggctcactgcaagctctgcctcctaggttcacgccattctcctgcctcagcctcccaagtagctaggactacaggcgcccgccaccacgcctggctaattttttttgtatttttagtagagacggggtttcaccatgttagccaggatggtctcgatctcctgacctcgtgatccacccaccttggcctcccaaagtgctaggattacggcgtgagccaccatgcccggcctctctgtactattcttgaaattttttctgtaagtctaaaattggtatgaaataaaaggttaaaaataaattcatataaaattcacataaaaaagactgaaatcggccgggcgatttcatggcgagtttgaggggcatgtgagacatccgaggagagactgctagccaatggcattagttccaagtcgaggtcagggctggaggaagaatgtagcggccctttggcctatagatcaggtgaccgagggagacaggacaacatgagaagagggcctatggtcaaatcatggggcgccctagcatgtagacagccagatctgtactttgtgtctctgtgtcatggctgccctcaggagaggaaacatttcaaaagggtgggggtcatgtcaaatgctactgagaagtcaaaataaaatgagaactgaaaagtactttggatttagcatcacgcaggtcctggtgatccaccattttcagctaacaggatgtccaaaggcctctgcacaaagggcttggaatggttcacaacagattgtcaatcacttcccacccaaggacttcccagtcactgtcactccagagagcacaagttctagatcctctagcagggcacccagagcaagacacatgtaaaacaagccgctgaaaagtgtggaaaaaatatcatcactttcattccttttttatctcaaccgttttaatgtctatttcttgatttttttcttttttttttgcatttggtggggacgactcctgtcgcccaggctggagtgcagtggcacaatctcggtctactgcaacctccgcctcccaggttcaagtaattctcctgcctcagcctcccaagtagctggaattacaggtgcccaccactatgcctggctaatttttctattttcagtagagacggggtttcaccttgttggccaggctggtctcaaactcctgacctcatgatccacctgcctcagcctcccaaaatgctgggattacaggtgtgagccaccgcattcagcctatttcttgaccattttaataatcaatatacaattggtaaaagtgatgtggcgatgtgtgtatctacatcttagacccacgtatgttgggcatgtgtgcacatgcacccttctctgtgagcctgcacataatggcagagatgctcaaaaggtgcttacgctggggcatgcagaccaacaccccagacccctgcctctgaggctccatcggtcagtgctcttggcctcaagccatctgcacatgtgtgtttcagagagtggggtcacattctctaagtctaggaagaagcttttccaacttgggtatcatccataggaaaaaacattgctgttagcccatggaaaatgggtggccaccaaaaccactgggcagtgacccgcttcctgatgggaagtgtgggaacgaccagaaagggggtgagagaggcatcacagcagcggcagccagggcctcctcatcaggtaccacacacgaatgctcccctggctgccatctgccaacatccgaatgctgtttcgattgccataaagacaccaaacttccacagtctacactctcaggaggaatgaggaatacccaccgctcactcagtctccgtaaggtggcttctgatagatataccaagagcccctcctcgtagaaagatagatcaggattttccaagggtagataagaggcactgccaagccctggagtagcgaagggtggctaacactagttcacatctcacacagatgcagaaagactgaattacttacttgaaattcattttctttctgagcttgttcggatccctctttattacaggacctctatgaatgagaaaaaggaaacacttctggtgagatggggaacactaaacagacactaactttgcaaccaccagaacagtcagggtttacaaaacatcacaggtctttaaggaaggtttctcagcccaccgatgtgacgggcagcatctaatgcaccagcagcctccagcactagtaccaacaccttagaaagtgcttcattgctttacgagaaaagggatgtgccggtgagacccgatagctgcacgtctcacagccgccccatgtacctttcacaatttcattgttagaggaaagtcaatagagtgcactcttccaatcaggccttctaaagacaagcggtcaggctgagtctctcaccaatttagctacgtggttctctcaagtcaacctgcaagaacagggagtgtaaacatgcctgtggacagctgtggtcagcacagaacttggacagagaagaaagcgctgtgcaggcaggaaacctggcacaaaatctgtgcagacatgccctgccgactcgccactttcccagagtaacccctctagttcagccggtcaccagctcaagctgaactgttcctctaccataaagaggactgtgtgtatttaataaagtctctaaaattatttcatatattaatatattaagaaatacttatatcactttcctcaatgaaattgcaaatttatgataaccaggattctagcaataacaacacactagatcattaactaccataaacaacccttgggctacattctttctcatggtacagatcatatattttaagagcaaccccccaccccaaatgctttaaaatccttcgtactatctttaataagggaatggggaaaagtaaagtcagaaacttgtgtcacgtcaaacttttatactcaaatactgcctctaaaaatgttacttgttaaattaaactaagtctgcttaagccagacacaaaaggaatcccagaaaggaaacctctttaaaaaaatttaaggtaacagattcttgaacaccccatgaaaaacatacctttccattccacagctttatcaaaaatacctgtaccaagggtggaaagtgtggacaggaaaaaaaatgccacgttaagcaacaccagctactctagcaccaatcaaaaacctagtgatttaaagcaaccactcatccatcacacactgaaataacattacagacgttttaatgcatgttttgtataaacagtacatgtaatataaaagtaaacaaaataagtatccatgttcataaatctatttgcaaaaggctcttaacgtttgcactgatacatattcaatactatatttagcatacagttaagtacatttggtacaaagtacagaaagtacaaatggggatttatgatattttcatttgtgtaatctgcagttctctgatgaaaagatgttacaggttaaatcccgttacaatgaaagctataaaaatcaaaatactacaaaaatgctttcagatctttgcagatggtttgatgtgcgatgtggtaggcgctggaaagcttcccttcaccctaattccaaacactctcgtggccgcatcgttccttagactctgctttgcgggtcgcctcttccaagcagtctgtaaattcctaatgaatagggactgcgtcttttattgatgttagtcttctcccagagcaccaagcaaatctcgatgcccactacactttttaggctgcatgaataaatgaacactccggagtggtatagcacgaggcaagtgagcccaacgagctgcctggtgccacgcagccaaccagtgatagcaaattcccatccagggtcttggtaacaaggaagctggctgtggggttaattagaaatgccccttcaaaagtccttgtgtttttttctccaaagaaacttaagaacaaaaaagttctataatctgatatattacatattaatactttgcagtataagctttaagacaaataagttagatactcttctgaaattgttgtaacgggatttgacctgtacacaattctaaatgactatggttattcctatgctgttgttactctaactgtatcttcttagggagatacagttaatgggttatttagccttcagaagtccctttcccttatctaatggcgctcgcaaaagcaagttacttcatccaaagttaaaaattggctgaggccccaaagtctttcctttttttaaacatattggcactataagtggtagtaaatccatgataatctcccctgcccactccctcactccacccccagatgaattcatcacttataccataagagcaccattatgaaggcaagatggacttctgcaatatccagccctctgttctgtttcctcagtacagaatgttcaggctccctaagtcctgtaaataagaagtgtaagacgaggaaatctcaaaccaagtgtatattcatggaaaggtaagagaataactttttcgtccaggaagacaggaagttaaatatattttggggccggcgggggtggcccatgcctgtaatcccagcactttgggaggctgaggcaggtggatcatctcaggtcaggagcttgagatcagcctggccaacatggtgaaactccaactctactaaaaatacaaaaaaattagccgggcatagtggcgcatgcctgtaatcccagctactcaggaggctgaggcaggagaatcgcttgaatccgggaagaagaggttgtagtgagccaagatcacgccactgcactccagcctgggtgacaagagcaaaactctgactcaaaaaaaaaaaaaaatacatatatacgtatatatacacatatatatacgtatatgtgtatatacatgtgtatatatatacacatatacgtatatatatgtgtatatatatatacacatatatacgtatatgtgtatatatatacacacatatacgtatatatgtgtatatatatatacacatatatatacgtatatatatgtgtgtatatatatataggaatccgtgggattttacttcagtgacataaattcatttgaagtagatattaaaatacattgtataaatatttagtatgacatccaacttttctctaacaagttaataaaaattatcctctataagttataaaacaaaactaagctttttacatttattagaaatttgaacactggttatttaatattaagtaattattaaatttttttaatgtgaacattactgtggtcatttttaaaaaatcatcttatatagatacagactgaaatatttacagaataatataacatctggaatttgcttcaaaataaccctggtggagtaaatgagggaaaagatggaagaagactggctgtgaggggaagatgaggaatggacactggggttcattatactcttctactttagggtatatctgaaattccccataataaaaacttttaaaaaataaacattgaaatttcaagacctaagaaatcagaatgtctcaattatgcctaagacacccaactccataaatacactgaaaaccactgaattctacacttaaaaggcacacaataatgaaaaatatattgccactggcttcctcccaccttctttctttccttcctattttgggcttagttttcaagagaatcttaagttagagtcatatattcattagcctgtgatgtaggaaacaaatgaggctacagtgacagcattaataaaggaggcatacttactattttaaagttagcttttaagaggtgaaactttaaaaaaaaaatttggagactgggtctcgctctgtctctcaggttggagtgcagtggcaggaatagggctcactgcagcctcaacctccccaggtcgagcaatcctcctgtattagcctcccaagtagcaggaccacaggcatgtgccaccatacctagcctttttttttttcttgtagagacaagatctcactatgttacccaggctgctcttgaattcctgagctcaagtgatcctcctgccacagtctcccaaagggctgagattacaggcatgagccaccatgaccagcctgaaaaagattttttgattggccaagaacttttaaatttaaaaactaaattcctgaaagtctgaattatattagctatggagtaaaatgagaaaatagaggactttcatttttactttatttctatactttaaaaagtgcttaaaagcgtgtattatttttataataaatacatttgatacaaggtttcaaatgttacttttctaacaaaattgcaatttaaggctttggggtttttttgtttgttttgttttttgtttttgagacagcgtctcactctgtcacccaggctagagtgcagtggtgcaatctcagctcactgcaacctccacctcctgggttcaagcgattctcccacctcagcctccggaatagttgggattacaggtgtgtgccaccacgcccggctatttaggctttgtattttaaatgagactatgaaaagcagtaaatattcatattacagagcacaggttttcaaaatgttctacttcatgctttaaaaataaaatgggccaggcacggtggctcacgcctgtaatcccaacactttgggaggccgaggcaggcggatcacgaggtcaagagatcgacaccatccttgccaacatggtgaaaccccttctctactaaaaatacaaaaattagctgggtgtggtgatgtgcgcctgtaagtctcagctactcgggaagctgaggcaggagaatcacttgaacccaggaggccgaggttgcagtgagccaagatcgcgccactgcaccccagcctggcgacagcgagactctgtctcataaaataaaaatacaataaaaaaaatcaataagtggtaagacaactccaggaccaaggaggaagagatgtccctttattgtattttgtgttatatgattttaggattcaaaaacctactttaagttacctaatgttccacaatatagcaggtatatttcttttaacctatttaagccatcagacagaataaacttatttggccagtacttaatgaaagacttctctaatactgagggaagtaggtttatgactaaatgaataaagccccatttgggagatgaaaacaaagcagcacctcagttttccctagagtctgtgtatagtaagaatgggtgaaagcggcataaagaaagtgtcattaagtcacatatagttatcatttaaatgtcatttggctgggcgtggtggctcacgcctgtaatcccaacactttgggaggccaagatgggcggatcacgaggtcaggggattgagaccatcctggctgacacagtgaaacaccgtctctactaaaaatacaaaaaattgcctggcgcggtggcgggcgcctgttgtcccagctactcgggaggctgaggcaggagaatggcgtgaacccgggaggcggagcttgcagtgagcagagatcgtgccacttcactccagcctgggcgacagagcgagactccgtctcaaaaaaaaaaaatgtcatttaaaacatctttaacacccaaaacatttatcttcaaagtatctttaaacgtccaatactacatgagctgctgtgagacagattttaaaaagtgatgaatcagctacaaagaatagcatgtcatcaatagcaaaataaattggaaatgctatttaagaaacgaaatcattatcaattatggataatataatatgagccaggcatggtggctcacattggtaaccttagcactttgggaggttgaggggggcggatcatttgaggtcaggagttcaaaaccatcctggccaacatggtgaaacccaatctctactaaaaatacaaaaaaattagccgggtctggtggcaagtgcctgtaatctcagctacttggaaggctgaggcgggagaatcgcttgaacctgggaggcagagattgtagtgagccaagatcacaccactgcactccagcctgggcaatagagtgagacttcatctcacacacacacacaaaaaaatcataatatagaatagaaataggtactatgttaaatataatggtggctgctgaactaaaatgatatataaataagagtacaggttttttatagaaaaaaaattgtgccatccattttttaatagaaaaaaagaaaaatacacacaaaaaaagaaaattaagaaacatggatgacattctcttcttcctaccaccccttcctcaccaaaaaataactaaatggatcattcagcttactgtctcttttaaaggctttacataaaacggtagattgattgtgaccttttaaaaatgctttgagacctataaataaataagtaagaataatcctgtctgggtgcagtggctcacgcctgtaatcccagcacgttgggaggccgaggtgggtggatcacctgaggttgggaatttgagaccagcctgaccaacatggtgaaaccctgtctctacttaaaatacaaaaattagtcaggtatagtggcacatgcctgtaatcccagctactcaggggactgaggcataagaatcgcttgaacctgagaggcagaggttgccgcgagctaagatcacgccattgcactctagcttgggcgacagtgggaggctgtctcaaaaaaaaaaaaaaaaaaaaaaaaaaaattcctactgttagctagactcagtttcctcagtttctaggatatgtaaattttggtctcggaaaataatccatctttctactaatctggtattatcttcctgagctgagtactgaaacaactcccaggtcatcgtattcaccctgagaataggaggatatggtgcatcattcggattcaattcagtagctgtgatgcccatttggtcttggagtggcatgaacttctttactgtgtagcctgtggcttcggagacccttaatacccaccctggttatctcaccacactcaaccctctaggagagaaataatttttaatacaggggtggcatctgttataatccctggcctgccaagtccctgttgatgatgaagctatgttccatctcaggagaggtggggcaggaaaaagcatgagaaccatgactctatagaatgtgttcaattctatagaattgaaagagttatgtgactctttcaattaacattttgcagtatattttcttggcaatatgttttcttctcagagttatcatggaccctaaccttacttcttcctgatttctatgaaaaaaaatgaaatcatcccgtatttcttgcttttatggtttcttacagcattctttctcgaactcctgacctcagtgatccaactcgcctcagcctcccaaagtgctgggattacaggtgtgagccactatgcccggccacttttagcactttctgaaaacattttacagaacacattaaaatgtgagatctcaatgcaatgatttaaagtatagcttatgtgattatttaataagcacatatgaattacaagaatttaaacagataagtgatttctaacattttatggtagtctctagagtgtcttcaattatcccaaggaccagcctaaaacaccttgatctttttggacattaataatttcaaaattggatgacttgatgaatatccgtaggaaactagaacttctaaaacactttaggcaacacaagccagcagaaagacaggtgagtggaagcccaggttttaaaaaggcctatttcaggaccttctcaaaatctatgtctgatctagggcaacctgctgacccaacactcctcagacttccaagactaaataaaataccctccctctaagtatcccaaaggttgacttgcaagcaacacttttacgggaagtgtgccttcactacatcaagtcagcactgcagagctccctaaggtctcaggtacccagctaagacatatgaaagtatactgactggtaaggacaaagaagaaggtttgtttctaattctgaccaaaatatcaaaatatatatggtgtctccttaatgctggaagtgatatgaaggaagaacttgattacttcaattaagttatcaagttgaggcccataaatttctaaaattcctaaatgtttgtcattttctactgaggaaacagaagaaaggaatctgatttgctttggacaaaaaaaataagtgatatatttattacacaacattctgaaatcttaatcactgtacctctttaagcacagcacaaactgtagctggtgctacttaacaagcattacaactttcttttttaaaagcaattcttgaatccaagaactaaaagaaagaaattaaagctgtagagaatgctccaacttcagaggtctcatactataccgtgaatcgtgtctgtcacctggaaaccagagtgctccaggcacgatcgcatggacaagcctgcagcagagaacacatgcacatacagctaaagtggtacattacccccaacgcccttcactccacccaacataaagacattccttcccaaagaggggtgggctgcggtcaaaccatcgttccatggaccagaaatccgcattggcttcatgctataaatcccaaacatttaataccagcaagacaaagacactctgaatatgtaaaaattagacatagtagtctgtggtttatttggttatcaaaagaaggcaccaaagcaggtatggaaggactattggtagtaatttggcaactatcttgggagagtatcagctaaagaaatattaggttagaccaaatgggaacgcacaacactagaaaaatgttttacttctgagaaggaagttttgactgccttaggaacacagaattaaaccatactcaaaagtataagggaatttttttaaagcagagtgaacagaacaacttaaattcctaatgatcctaacacaatgaggaaaacagtggcaattcatagaattcagttaccagggacatgactccttcaaggagtaccagcaatgctggtctttgcatggtgtgaccttagtaacataaagaaataggttttagcagctgatttctcagtagctggtagtttaatattaactatttatgagttattccatattttattgtggcttaatttttaattaaactggggctaagagaaaatagggaggaagacatttgttttctagatttaaaaaggacagtgtctcaaatttgactcttttaagttgctaatacatatctgcgttgtgccttgatgcctttattatggttagtactcaaacaagcactaatattagccttctattactcaaaaaacaaacaaaaacaattttccagacaacattcaagagagatctttgatgtgtattataaacgttcatgcctgtgagaccgctcataacggtgaggccaaatctctccactcatgcacagaaggaagtggcttaacacagagtcactgttctgacagaggaagggacaaagcaatcctctgagacttccgccaactggcacaggttacattgaatgaacaatacgtactgacatttgtgtcttccacaattcatgataaataagcaaactggttatttgtaatcagccaaacttgcttctctgaaaaggctgctactggacgttgcagagctcatgttccttcccagtatcagaaaggaaaaaaatcaagttacatttatagctaattttatacatttacgctctcttctagcaattctatctctttccacaatgcaaaggctgaactattacttctcaaaacttctattaaattatcctcctttagttcagggtagttttacagttgagtttggttttcataatctatgtagctaatgaaaataatctcatttccattaaaattaaagacagtctatgtaaaacagacgctaaattatactcacatgcattaagatcagaccaatatttttatgtttaataatttcctacaaataatattgtatagttgtgtgtgtcttatcttgttcatattttcaaaaggacccattcttgaccttgccaaacacaggaattttcataagcaccctaaaactaacacaaatactaaacaaaaactccaggatacagtcaggaagtttgtttccgtctcatcttagatagaaataggggctagaagagacagatgtttgtgggacagaagctgtggagctgaacccaatcagaaagttttaccttggctttctggcacttaacccttagagaactgtaccaaagagcagtcatttcagtgtcactatggaaataaaggaaatcagacatcttataatgccaagatgaagaaaaatgagaaagttgagaatcatctagttattttaaaccaagtcacctgtaaatcatttgctgatcaaagaacgtgtaaaatgttaccacctctgattctcacagaggtaaaatgttcaaaagctaaaaacaaggaagagaaatggaaagaagggacatactaaactaaatctgtcatataattaaggaaaaatgcaaaatactctgaaaaaatacatagacctattatttgtgcagtagacttcaattaacatttttcaaagaaggagtgaattctaacccatcttaaaggacattatagctgcatttataaagttggcttgggagataccagttatattgtataagtacacatacatgtataggatatgtgtatgctttcccataaggtagagcaaaaagaaggaaagcagaagacttgagtcatactatatttaattctctctttaaccatgatgtgatttattattgggggctctgtatttgctcagccacatctctcaattaatgcaaatcttgacaattttttatcaatcctgacaatttatcataaattctggctttttttgttgtgataggaacaaaaccctcattgtagaccataaatatctccttccattataggccagattcattctaaagagctggctatacattagcaatttcatcacagctagatcacagcaaaaataaataatagaaactttaaagctgatttgaaaatatttggaaaggaatttaaaatcctcggcacagtgtgtggcagctcagcttctaaagcacacagcagctgttgcctggctcgcatcttagaagcttctaagcctgttctctactttgcttcttttgtaccatagccatcttttggagttcttgattttggttcccctcctcatgttgtcacagtactcccaatgaccaacagtctccaatggccattaatatctgaaactcttaactggcaacaagtatgactgctaaactctgcagagctaggaaaccaaatatacttaactctgagactctaggcttcatggtttcctaagtttaaactacaaccaaaaaagtgtgtttgaactaaggactcgaccaactgaataattatattgaaaatatagattcccacctaagaagcaaagaaatagtttttttctaacaaaaatcagtttgttgtctatgtcaactgtcagattgttagaggtatgcttattatccgtatagaaaactactaatttcccatccagttttttttgggttttttttttttttttttgagacggggtctctctctgtcccccaggctgcagtgcagtggcatgatcttggctcactgcaatctccacctcctgggcttaagagatcttctcacctcagcctccaaagttgctgggaccacaggcacatgccaccacgcccagctatttttttatagagatagggtttggccatgttgcccaggctggtttcaaactcctggactcaagcaatccacctgccttggcctcccaaagtgttggaattacaggagtgagccaccatgaccagccctaatttccctttctatccaaggtgctttcaagtatggtttctaccttacatcagtagatatagcttcaggaatggaaactcatttaacatttgcctaataaaaatataactgagaagctaaatgtagggtacctcctccccccaaattggaattatatgtaaaacatactccattctattagtttggtaagagctaattacattttaagtggcttaaattattctttttatttttcttagttacttaatagtcttttttcttagaaataaatcgggacatagaattctgttcaaacaaattttatttccagacatttctactgtatttaactactgtcaggtactacttccagactgctaaaatttcaaaatggaagaaagactaacaattgacaatgaatctttattagaggaaggctaattgccaagtagtaggctatgctgcagctggcttttactaagtgactcatataataaaccagaacattctagagttgggctgtccaatacagtggccacgagctacatgtgactattttaatttaaattaattaaaattaaaaacaatttaaaactcagttcaacagccacacttgccacattccacatattcgttagtgacatgtggctgatgacgagtgtatcagacagcacagatgcagaaccctccattactcccatcactatagcactgttctagagcacaggattaaactcccaggttagtctagcccacagaggagcaccttgtaacacatttaaaatgcttcttaagttagaaatgaaagcctcataaatcagatttaaacaatagttttaaatcacatgtaatttcagcatctacttattattgtaaaagtgttgtataaatgcaaaacacaaaaaacagcagaaatgggacttaatcgttgcagaacgtaaacagtcctcaaagaaaaaatgactatcaagacatagcaggccaagtgcagtggttcatgcctgtaatcctagcattttgagaggactagacgggtgcatcacttaaggccaggagtttgagaccatcctgggaaacatggtgaaaccctgcctctacaaaaaatacaaaattagctgggcgtggtggctcactcctgtagtcccagctactcaggaggctgaggtgggaggatcacctgagcccaggaggtcgaggctgcagtgagccatggttgtgccactacactacagcctgggtggcaaagtgagatcctgtctcaaaaaataaaggcacaccagtaaaagtgccaaaataatgatgaaagatttcaaaaactatactttgaaactgcaacctgattaaatttaaaacccaagctgcatggtgaacacaagaatcttttctgcttgtgtattaacagcaaggggtctgtgttttcagctggcatcaactgttgtcctagctggatgccagctatctgcacctaatgacaaagtgacctcagatatcctcagcaagtgcacacgtgtgtggaatagctacgtaccttcaaacatactaacttgttcccagcatttttagatcttaaccatttccacagcttgacagagtcaaggaaaagctatccaattaaagggtttcttcacattatgacaatttttttaatgaattaacatctagactgccaatttgaactttaatatttctaaacatataatcaaatatcatatggatatgatctactttttagattgagctgaaataggccggtcttttaaaaaatttagtttgaaaactactctgctctatttcattaagataaaaatgggcccttccaaagaagattaaaatggatatcagggccaggcgcggtggctcatgcctgtaatcccagtactttgtgaggccaaggcgggcaggtcacaaggtcaggagatcgaaaccatcctggctaacatggtgaaacctcatctctactaaaaatacaaaaattagccaggcgtggtggcggacacctgtagtcccagctacttgaaaggctgaggcaggagaatggcgtgaacccaggaggcgcagcttgcagtgagctgagattgcaccactgcactccagcctgggcaacagagcaagactccatctcaaaaaaaaaaaaaaaaaaaaaaaaaaagccaggcacggtggctcacacctataatcccagcactttggaggccaaggtggacggatcacgaggtcaggagatcgagaccatcctggctaacacggtgaaaccccgtctctactaaaaatacaaaaagtgagccaggcgtggtggcaggcacctgtagtcccagctactcaggaggctgaggcaggagaatggcgtgaacccgggaggcagagtttgcagtaagccgagattgcaccactgcacaccagcctgggtgacagagcaagactccgtcgcaaaaaaaaaaaaaaaaaaaaaaaaaacaacaggtatcaaaatcctaccacaggccaggcgtggtggctcacacctgtaatcccagcaccgcgagagggtgaggcgggcagatcacctgaggtcacaagtttgagaccagcctggccaacatggtgaaaccctgtctctactaaaaatacaaaaattaggcgggtgtagtggcacacccataatcccagctactcggaaagctgaggcaggagaatggcttgaacccgggaggcagaggctgcagtgagccgagatcgtgccactgcattccagcctgagctacacagccagactccatctcaggaaaaaaaaaaaaaattctaccacagaaatacctcaacctggccgggtgcggtggctcatgcctgtaatcccagcactttgggggaccacggcgggtggatcacttgaggtcaggagtttgagaccagcctgaccaacatggtgaaaccccgtctctactaaaaaagtacaaaattagccaggcgtggtggcatgcataacgtcagctacttgggaggcttaggcaggagaatcacttgaacccgggaggcagaggttgcagtgagctgagatcacgccattgcactccagcctgggcaacaagagtgaaactccatctcaaaaatatatatatcaacctaatatttctaccgtgctcaatgaaatagtaaattcatgacattaataataataataataaacccagacaagttgggatatcctataactggataattcaataggtactttaagaattagattatctaatataaaactttagaaagattatgactgtaacaaacaactcaaagttttaaagaaatctcagagaaacagttattaaattcagcttcgttgagatcatactttgttaactgggactatcctctaaaatcttttggataatgttataaaaacaataccttctccacattagaactttataatctaaatctgagctgaaaattttaatcaatatgtagaaccaagaatcatcaagcactattgaagatttaaccaacattgtaccttctctggatgtaaaactgggaatacttgcactagtttactaataaataataactaaaaaaaacacgaattaacttagaatgcaaaccaagctgtgcagcccaattaaagtaaaagtaaaagcaatatactcaaatatctttagtaacaccattaaagtatttaaaatctctttccaaggtatctcagcaaagaggatttaaaatgttaacaggatccccccctcccaaagtagcctaccaactcaccatctgcaaaatcgctccatacagccgcaggagcactttccgaggctcatcaccaagggtggctgtggtgtcaggtagggagcactggaacagcatgttgctaaggccgcctctgtcagaaataagaggacagtaagtatctttattgcaggtgagctaaatcactcttcttggataaatatggatgaaaagtcagggttacacaagaactgttctcatcttatctcgatttattctctcaatttaactccatgagtcacattaaaaacagacaaattccctttctgtttttctgcagtagaggtggggaagcgtttttgaaattgcccgtgtgggccgggcacggtggctcacgcctgtaatcccagcactttgggaggccgaggcgggtggatcacaaggtcaaggaatctagaccatcctggctaacacggtgaaaccccgtctctactaaaaaaatacaaaaaattagccaggcgtggtggcaggtgcctgtagtcccagcaactcaggaggctgaggcaggagaatggcatgaacccgggaggcgaagcttgcagtgagccgagatggcaccactgcactccagcctgggcgacagagcaagactccgtctcaaaaaaaaaaaaaaaaaaatcttgaggcaatatttaaaccttcttctctagggctttccatttgatatgtattaatagttccaagatcttctacgctagtgttactaaaaatctgtcaactgattttgactaggagcttgttcaaaaaactcccaacattaactggttaccacggccttcagatgaaacaggagacctcaatactctaatcacacaccaagtaagtagctaagcaaggaatcaaacccaggcatatggctcgagtccctgcttgtaactaaccatgaagagttgtcaaagagataggaggcaaagctggagagcaccatgtgccacattaaagacattacaggaggtcgggcgcagtggctcatgcctgtaatcccagcactttgggaggccaaggcaggtggatcacctgaggtcaagagtttgacaccagcctggccaacatggtgaaagcctgtctctactaaaaatataaattagccgggtgtggtggcacacaccttgtaataccagctacttgagaggctgaggcagaagaatcgcttgaacccaggaggcagaggttgcagtgagccgttatcgcgccactgtactccagcctgggcgacagagtgagactcctatctcaaaaaaaaaaaaaaaaaaaaagaaaaagaaaagataaaagaaaaatgtcataggagctgcgtgagctgcaaaatcaccttccatcaggactactctctataaacctctatgacacaaacatctccatgtcctattactgctataacaaattactacaaatttagtggcttaaaactgaaaacagattctgatcgagctcattaatttttaaaaataagggtaactaggtggaaatggggagttggtttaagtttaatgggtacagagtttcagtttgggaagacgacaacattctggagacggatggtggtgatggcagcacaacaatgaatgtacttaatgccactaaactatatatttttaaattgttaaaattgtatttttaatgctgcttattttaccacaattttacttgattttatttatttatttatttttttcagagagggttttgctctgtcatccaggctagagtacagtggcacaatctcggctcactgcaacctccaccacccaggttcaagcgattctcctgcctcagccccccaagtagctgggattacaggtgtatgccagcatgcttagctaatttttgtatttttggtagaaacggagttttgccaggctgctctggaactcctgacctcaggtgatccacccatctcggcctcccaaagtgctagaattacaggcacaccatgcctgaccttattttaccacagttttaataaaaaagtatgaagtactgatatatactacaacatgaaacttaaaaacattatgctaagtgaaagaagacagtcacaaaagaccacatgttatatgattccattcatatgaactgtccagaacaaggaaatctataaagtccattagtggttgccaggagctggggtgggaaggggtacttaggggtaggggatgatagctaaaagtttctttttgaaagatgaaaatgttctaaaactgactgtggtaacagctgcaagtatctgtgattacactaaaagccactggactgtacaatttaaatgggtgaattgtatggtttgtgaactatatctcattttcttaccaaataaaaaatttgaatgtgcttctagcacaaacaattttttcccagatttaagtaagacatatttaagaggttttttcaaaggttacttaaaatgaaaaaccatcatgagtctctaggaacaagacagcaagagtcaggatctattttcccagaaggttgtctaccttagttaaaaagaacaaaaataaaagggaacccaaagttcttgttttcccaaagcaagctgtgaagcaggccgacagcgtgtagatcaaaggaaccaaaagcagccttaacctttctgttaaacttggcgtggcgcctcaactgtgtggcttatcagaatccccctgccgcgtctggtcacagccaacatgggtttctggctaccaagcaacagaacgggcattaaaacagagttaaaagccctagtttttcttccggtcacatactctggaaatctcagtcaaatgcaaaggcaaacagatgaagtactgttctaaattgtgtaacctgattcaaagtttacccccgtactgctaaagaaggaaggcagactagcttggccagaaacaagctcacaacctggaaacccttcaactgctttttattacctgtagcctctattgttcaataggttttagtgaataaattgtcaattattttttagtgacagtcaaaataaatgaagcaaggtgactggcaccaataacccaaactgtgagaaatttacctagaaaaaaagccaactaccaatgagtcaaataataatatgaccaggaacaataaaatgtggtaggaagaaatgccagaaatggtagcaaaaatgtaacagttcaatttatcatataatttgtcaaaaatatcctcccaagtaaaaccccaggagctctcaaggatttgcaagaagttttgaaaccacaaactttatcacctggcataatagctttataagtcataattagatatgagaggcatgggctggatgtggcggctcacgcctgtaatcctagcactttgggaggctgaggcgggcagatcacttgaggtcaggagttcaagaccagcctggccaacatggtgaaaccctgtctctactaaaaatacaaaaattagccgggcatggtggcacgtgcctgtaatcccagctactcaggaggctgaggcaggagaactacttgaacccgagaggcagagattgcagtgagccgagattgtgccattgcactccagcctgggggacaagaacgaaacatcatctccaataaataaatacataaataaataaataaataaataaataaatacaagagcgaaacatcatctccaataaataaataaataaatttaaatatatatatgcacacacacacacatatatatgagaggcacaagatactcaagcaaaatctcaaatacagtgacaataacacacttattccacactcaacacaatgacaggaaggaaacagaaaaaagcaggaagtacctgctggcaggaattctcacccctgccctccagacccagtggtgcacgcatcactaactgtcaacccatgattccttaaaacagaatactaagggaataacaagcagtataaagaggttcttttttttttttttttttttttttttttgagacggagtctcactctgtcacccaggctggagtgcaacagcgcgatctcggctcactgcaagctccacctcccaggttcacaccattctcctgcctcagcctcccaagtagctgggactacaggcgcccaccaccacaccgggctaatttttttgtatttttagtagagacggggtttcaccgtgttagccaggatggtctcgatctcctgacctcatgatctacctgtctcagccccccaaagtgctgggattacaggcgtgagccaccacgctggtccaaagaggttattttacataaattgttgagcaaaaatgaaatgaatcatttcagcttctcttgatagccagaaaaacaaggcaagagaaagaaataaaaggcatccaaattggaaatgaagttaaattatccctgtttgcagacaacatgatcttacatatagaaaaccctaaagaccccaccaaaaaactatgagaactaataagttcagtaagattgcaggatacaaaatcaacatacaaaaatcagtagcagtattatttctaaacgggaggctcaggtgggaagatcacttgagcccaggaggtcaaggctggagtgagctgtgatcacgccactgcatgccagctaatagcaaattatctggaatggaaatcaagaaaacaatcctgtttacaatagctaacaaaaaaaaaaagaaaagaaaaagaaagaaatttaaccaaggaggtgaaagagctctgcaatgaaaactttaaaatattgatcagagaaactgaagacacaaataaatggaacaatatcccatgttcatgtattagaagaattaatattgttaaaatgtccatactggccaagcgcgtggctgacgcctgtaatcccaacactttgggaggctgaggtgggctgatcacctgaggccaggagttcaagaccagcctcgccaacatgataaaatcctgcctctactaaaaatacaaaaattagctgggcatggtggtgggcgcctgtaatcccagctactcgggaggctgaggcaggagaatctcttgaactcaggaggcggaggtggcagtgagccaagatcacgccactgcactccagcctgggtgacagagcaagactctgtctcaaaaaaaaaaaaagaaaaaaaaaagtccatactacccaaagcaatctatacattcaatgcaatccctatcaaaataccaatgacattcttcatagaaataggaaaaccaatcctaaaatttatatgaaatcacaaaagaccccagtagccaaagcaatctggagcaaaaagaacaaagctagaggaatcacactacctaacttcaacatatactacaaagtcatagtaaccaaaacagcatggtgttggcataaaaacagacagagaccaatataacagaataaaagcccacaaattaatccacacttacagctacctgattttcaacaagtgtcaagaacacaatagggaaaaagacagtctcttcaataaacagtgttgggaaaactggatatcgcacgcacaagaatgaaattagatccttatctcacaccatatacaaaaataaactccaaaatggatcgaaaacttaaagtaagacctgaaactatgaaactgccataagaaaacatagggaaaaagcttcatgaccttggtctgagccaggaattttttttaaaagacctcaaaagcacaggcaacacaaacaaaaataaacaaataggattatagcagactaaaaagcttctgcacagcaaaggaaacaagagtgaagaaacaacctacagaatggaagaatctatttgcaaactatacatcagttaaggggataatatagaaaatatacaaggaactcacagcaaagaaaggaaaggaaaccaattaaaaaatggacaccagctactcaagaggctgaggcaagaggatcactagagcccaggaagtcaaggctgcactgtactttagcctgggtgacagagcaagaccctgtttaaaaaaaaaaaaatatatttgccctaaatggtggcgtgtgcctatattcccagcttgggaggctgacataggaggattgtttgagcctaagagtttgaggctgaagtaagctatgaatgcaccactgtactccagcctggatgacagagcaagattccatccctcaataacaaaaacaaggcaaaagacccaacagacatttatcaaaagatgacaaataaatggccagaaagccacatgtggtaggtagcacgtgcctgcagtcccaactactcgggaggttgagatgggaggatcacttgagcctgggaggttgaggctgcaaatgagctgtgattgtgctactgcactccagcctgggtgacggagcaagaccctgtctcagtaaatttaaaaaaaataaaataaatggccaacaggtatatgaaaaaatgctgaccaccactagtcattattagactgtctattttcaatgataaaagataacaaacgttgacaaggatgtggagaaaagggaacccttacacactgttgatggcaatgtaagttagtacagatatgaaaaacagtatgcagggtcctcagaaaattaaaaatagaattaccattaagatccagctcctgctcatcaaagcaagtttaaaaaaaaaaaatccaggcttggtgcagtggctcatgcgtgtaatccccgcactttggaaggctgaggcgggcagatcacctgaggtcgggaattcgagatcagcctggccaacatggtgaaactctgtctctattaaaaaaacaaaaaaattagccacgcatggtggtgtacatctgtaatcccagctatttgtgaggaggaagcacgagaatcacttgaacccgggaggcagtgttgcagtgagccgagatcacaccactgcactccagcctgggagacagagcaaggctcagtctcaaaaaaataaaaaataaataaattaattaaataaaataaaaaattaaaaatccagcaatcccattactggtaatacatccagaggaaatgaaatcagtacatcagacatctacactctcatgtatattgcagcactagtcacaaaagccatcaattgattatagaataaatgtaagtgtccatcaacagatgaataaagaaaatgtggtatatatacacagtagaatcctattaagccttataaaagcaggaaattctgtcatttgtgacaatatggatgaacctggaggacagtacttatattaagcaaagtaagtcaggcacagaaagacagtaacaatgtgatctcacttgtgtagaatctaaaaaagttgatctcatagaagttgagaatagtgcttaccagaggcgaggggaggggagacagggagaggttggccaactggtacaatattatagtcagatggaaggaataaattcaccttatacctcataaataggacaattattattattattattttttgagactgagttttgctctatcatccaggctggagtgcaatggtgcaatctcggctcaccgcaacctccgcctctcaggtttaagcggttctcatgcattagtctcctgagtagctaggattcaggctcccactaccatgcccagctaataatttttgtatttttagtacagatagggttgcaccatgttggtcagctggtctcgaactcctgacctcaagtgatccaaccgcctcggcctcccaaattgctgggataacaggcgtgagccaccgcacccgaccaatatgtacaattattacatgtcaattataaacattatgaataatgctccattgcctcagcacttacatcaaatacacaggttataaaattataaaattctggccgggcacagtggctcacgcctggaatcccagcactttgggaggcaaagacgggcagatcatctgaggtcaggagttcaagaccagcctgatcaacatggtgaaaccctgtctctactaaaaatacaaaattagccaggcgtggtggcacatgtctgtaatctcagctactcaggaggctgaggcaggagaatcgcttgaacccgggagatggaggctgcagtgagttgagatcgtaccattgcactccagcctcggcaacagagtgaaactccatctcaaaaaaaaaaagagattatttaatgcctgttacattctatagcactataaaacaagaaaaacccatgctacatgctacagtgatacaacaacttagtaggctgcccaaggtcttgaaatatgtcatctctaggccggacatggtggctcacgcctgtaatcccagcactttgggaggctgaggcgggtggatcatgaggtcaggaattcaagaccagcctggcaaacacggtgaaaccccatctctactaaaaatacaaaaattagctgggcatggtggcagacacctatagtcccaactactcaggaggctgaggcaagagaatcgcttaaacacgggaggaggaggttgcagtgagccgaaatcgggccactgtactccagcctgggcagcagagtgagactccatctcaaaaaaaaaaaaaaaaaaaaaaaaaagaaaagaaaaagaaagaaatatgccatctctaatgtcaaacatctacctatttttaattatttgggttttttcccctgtcatttttagcaacggggatattttgggattcatgtatgtgaatccgctgaatgaatgcttaggcagatgacaaacctgaggaactgtctgctccaacctgtaacacaaagatttccacctgataaattaagataagaagttacctaaccaactatattttgctgaaaagcaaaaaagccactgaaagctccgcaaactgtctacaagtcacagggtacccagtctagcacatacagggcttagtccccaaggctgagggcctggacctaggagaaaatagagcaggcagttccatgactatcatctaaaagtcaaaatgactagaaagaaaaaaaaatcacgacataaccagtgtctcaacagagaaatgatctttaagccatagggctggctacatggaaaagagaatacagcgtaatatcaaaacagctactgaatttagagcacaaggaaaataagaaaaaaaagcagatttttgaaaaatttcttctaaccatctaaaattcaaattgcagctatggctcaggtgaaaaaaacagtgctgcagtaaaacatcagcacctctacggagtaatcaggacggtattaacccccacctctctgaaaacaagaaaagccaggaggtaccattaaaagaacaggctaggccaagcacagtggctaacacctataatcaatctcaacacttcaggaggtcaaggtgaaaggattgcttcagcccaagagctggagaccagcctaggcaacataacaagactcgatctctacaatttttttttttaattggccaggcatggtggcattgagcctgtggtcccaggtacttgggaagttgaggtgggatgactgcttgagcctggaaggttggggctgcagtgagccgtgatcacgtcactgcactccagcctgggcaacacaaaaaccctgcctccaaaaaaaaaaaaagaccagtccagcccaggtggagtgctggctctgcacaaaatagctgtgcagaccttgggcaggcctccaagtctgttttcacaccataaaacaatgtagcagtatctaacagaagtttctgcgaaaattacatgagatcatatgagctgttcacttatcagcaccaattgcaaagcaaaggttaatgtttaagaggatgccagaaggaagaaaggataaagctcagtcttaagaattctactccagcacggctcagccttgacgctttgtatctggggccaggtcattctttgctgaggggcaaagctgccctgtgtactgcaggaatgtttagcagcaacactgccctctattcactagatgccagctgtactaccaccaacatggtaacaataaaaaacatgttcggccgggcatggtggatcatacctgtaatcccagcactttgggaggccgaggtgggtggatcacgagatcaggagttcaagaccagcctggccaatatggtgaaaccccgtctctactaaaaatacaaaaattagccgggcgcagtggcaggcacctgtaatcccagctacttgggaggcttaggcaggagaatcgcttgaacctgagcagcagtgatttcaatgagtcaagattgagccactgcactccaacctgggtgacagagtgagactctgtctcaaaaaaaaaaatgttcaaacattaccaaatggcgagatgcgggtacaaaatcaccccactattcctctactttttttatcattctttctgcagtttttacctatttttccttccccaaaatttgaaaaccaatttgttctctaacttgattcccaacttataatcttttccttcctctattcaaaataatttcttcctcctgatttgcctatttcagttaacagtagtgcctttttcccactcacccaggctcaaaatcttcctcgtttccaatggcctggtcctctccctatctcccaaattctctcctcctttccattctcaatgctcctgcccaaatgtatatcctcccccaacccccactacagcagcctcctctctggtctcccagcttcttgatccctctctcctctatgctatcccctaggccaccttagaaagtgtttctaaaatacaaatttcaagccgccactgtccttagcacagtccttggaacacagcatgcctctgcctacccttcccacctaggaggtccttccaccaggcatggtcagaagtactccctcccactttctcataaagtgcttgcatcccttctagcccacgctgactcccagtcaatactcgacaaaaagagtactaggcacattaagatgtgtaaatacattacgaaagacacggaaattacgatctcattgtggaaaactaaagataagggttgtgccccaccacgcagcagaacgaggagattccctgccactgacagagaatggagagatcctggaaggacgctagacaggctgacggggctccactggaggggaaaacaggaaggagaacgtgggcatcactgaaagcaatatatgacagataacagaagaagtgcttttattattattattatctaaattctactcctagctgggtgcagtggcacacacctgtagtcccagctaatgaggagggtgaggtgggatgatcgcttgagcccaggaattccaggctgcagttgagctatgatcccacaaatgcactccagactgggcaacaagagcaagaccctgtctcaaaaagaaagaaagaaaagaaataccactcaaccttctggtttccagtccagtatgtgtaagaagcttagaagtcgccacctgatcctaacaacatgtaaaaagctaaatcaactgaaaaatcaactcttaaagaaataaggtggctgggcgcagaggctcacgcctgtaatcccagcactttgggaggccaaggcgggaggatcacgaggtcaggagatcgagaccatcctggctaacacggtgaaactccgtctctactaaaaatacaaaaaattagcctggcgtggtggcgggcgcctgtagtcccagccacttgggaggctgaggcaagagaatggcgtgaacctgggaggcggagcttgcagtgagccaagatcatgccactgcactccagcctgggtgaccgcaaggctctgtctcaaaaaaaaagaaatgaggttaagggggaaactgctgcctcccaaattggacagacagaccggcagatacagagaatcacagtttactggagcaaaatcctccaccaaatcagcactagggtaggaaaaccttaactataactaacaaattgccggaggctcagtgtggacaactgtgagagtttaaaactccaggagacccaattactggggagccccattctttgacgagttttacctccaggagctctacgagttccttacagtgaaaactgagggggggaaaaaatcccttcatgcttccagcagagggaggggcaaagaaacctttccttttttcttttcctttttttttttttttttttttgagacagagtctcgctctgtcccccaggcaggagtgcagtggcgcgatctcggctcacagcaagctccacctcccgggttcacaccattctcctgcctcagcctcccgagtagctgggactacaggcgcccgccaccacactgggctaattttttgtatttttagtagagacggagtttcaccgtgttagccaggatggtctcgatctcctgacctcgtgatcctcccgcctcaggctcccaaagtgctgggattacaggcgtgagccaccgagcccggcctcttatatttttaaatacgacagaacattctgttcttaacaaggtctgccctcaggagaaattattttgccagtgtctaacctgttgggattttctcagagcctaaacttcctgagagagggcaaatacacaattccagccccctctggccattctgtcccacctaagcggggaggagaactaagaaaaatgggtaaagttcacagtctaggtgcacaggctcaccaaaagactgagacctcaccataggactataggttaaacattcaaaaatcaacaataggctggatgtggtggctcgtgcctgtagtccagcacctggggaggccaaggcaggtggaccacttgaggtcaggagttcaagaccagcctggccaacatggtgaaaccctgtctgtactgaaaatacaaaaattagctgaatgtgatggtgcacacctgtaatcccagctactcgggtgactgaggcatgagaattgcttgaatccagggagtagaggttgcagtgagccgaggtcacgccactgcactccagtgtgggtgacagagcgagactctgtctcaaaataaaaaataaaaaataaaatcaattaatataatctatcacatcaacaggctaaagaagaaaaatcacatgatcatatcaatagatggagaaaaactatctgacaaaatccaacacccactcatggtaaataataaactctcagaaaatgaggaatagagaggaacttcctcaacttgataaagaacatctataaaaaacctacagctaacattatacttgatgagaaagtcacagcttttctacgaagaacaggaacaaggtaacaatgttccccctcaccacttttttccaacatcataggaagtcctaactaataagaaaaggaaattaaaagtatacagattaggaagagagaaataaaactttgtagatgatatgattatctatgtagaaaatcagaaagaagtgaaaaaaaatttctggaataagagattatatagcaggactgcaagatacaaggttaatacataaaagtcaaccagtttcctacataccagtgacaaataagtggaatttgaaattaaaagcacattaccatttatatgagcacccccaaaaatgaaatacttatatataaatctaacaaaatgtgtattttgttatgtcactcaatgtgtattgagtcatgggtaggaagactcaatattatcaagatgtcggttcttcccaacttgatctgtagatttaatgcaatcccaatgaaaaccccagcaagttattttgtgaataccaacgaactgattctaaaatttacagggaagccaggcacagtggctcatgcttgtaatcccagcaatttgggaggccaaggtgggcagatcacttatggtcaggagttccgagaccagcctggcaaacatggtgaaaccctgtctctactaaaaatacaaaattagctgggcgtggtggcatgcacctataatcccagctactcgggaggctgaggcaggagaatcgcttgaatccaggaggcggaggttgcagtgagctgggatcacgccactgcactccagcctgggcaacagaatgagactccatctcaaaaaaaaaaaaaatgataataataataaagtttatcaggagaggcaaaaaacctagaatagccaatgaagaataaagtcagaggaccgacaatactcaacctcaagaatcattatgaagctacattaattaggccaggcgcggtggctcatgcctctaatcccagcactttgggaggccgagctgggcagattacctgaggtcaggagttcgagaccagcctggccaacatggtgaaaccctgtctctactaaaaatacaaaaattagctgggcgtggtggtgggcgcctgtaaccccagctactggggaagttgaggcaggaaaattgcttgaacctgggaggcagaggttgcagtgagccgagatcgtgccattgcactccagcctgggcaacaaaagccaaactccatctcaagaaaaaaaaaaaaaatgagccaggtatggtggtacacacctgtaatcccagctactcaggaggctgaggcatgagaatcacttgaacccgggagacagaggttgcagtgagccaagatcatgccattgtactccagccaagacactatctcaaaaaataaaaataaaaaagctacattaattaaaacagtgtggtattggcaaaagaaaggacaaatggatcaatggaacagactagagagtacagaaatacactcacatagtcaacagatctttcacaaaggagcaaaggcaatacaatgtaacaaatgtcttttacaacaaaccatttgttgtttcaacaaatggtcctggaacatgcccggagcggtagctcacacctgtaatcccagcactttgggaggctgaggcgggtggatcacttgaggtcaggagtttgagaccagcctgaccaacatgaagaaaccccgtctctactaaaaatacaaaattagccaggcgtggtgacgcatgcctgtaatcccagctactcaggaggctgaggcaggagaatcgcttgaacctgggaggtggaggttgcggtgagccgagatcacgccattgcattccagcctgggcaacaacagcaaaactccgtctcaaaaaaaaaaaaaaaaaaaaaaaaagtcctggaacaacgggacgtccacatgcaaaaaaaaatctagacagacgttacacttcccaaaaattaaatcaaaatggatcataaagctaaatataaaatgcaaaactagataatttcttgatggtaacatagaagaaaatctagatgaccttaggtatggtgattgcttttatttatttatttactttttttgagacggagtctcactcttgtcgcaacagtctggagtgcagtgccgcaatccaggctcactgcaacctccgcctcccgggttcaagcgattcttcctgccttagcctcctgagtagctggcattacaggtgcccacgactacaccagactaatttttttgtatttctagaagagacagagtttcaccatgttggccaggctggtctcaaactcctgacctcaggtgatccacccatcttgtcctccccaagtgctggaattacaggcataagccactgcgcccagccagattacttttagatacagcatcaaaagcatgatccatgaaagaaataattgataggccagacttcattaaaattaaaaactgctttgcaaaagatactgtcaagagaatgaaaagtcacaaacaaggaaaaaatatttgcaaaagacacatttgataaaggactgttaacaaaaatatataaagaactcttaaaactcaagaataggaaaacactttcccactcaagaaggtgtggcaggtgcctggcacggtggttcatgcctgtaatcccagcacttcgggaggccgaggcaggaggatcacgaggtcaggagatcaagaccatcctggctaacacagtgaaaccccatctctactaaaaatacaaaaaattagccgggcgtggtggcagccgcctgtagtcccagctactcgggaggctgaggcaggaaaatggcgtgaaaccgggagacggagcttgcagtgagccaagatcgcaccactgcactctagcctgggcaacagagcaagactccgtctcaaaaaaaaaaaaaaaaaaaaaaaaaaaaagaagctgtggcaggaaaaaaaaaaacaattaaattaaaattttaaaatgggcaagaagctctgtggcatgcccctatagtcccagatacttgggagactgaggcaggaggaccacatctgtgaatacccactacactcaagcctgagcaatgtagcaagacccagtttcttaaaaaaataaaaaggaaaaagaaaaagacacaaactgacatctcatcaaagaagatatacagatagcaaataagcatctgaaaagattttcatcatatgtcattagaaagttgcaaattaaaataagatacctgactgggcgcggtggttcacgcctgtaatcccagcactttgggaggccgaggtgggcagatcacgtgggtcaggagttccagaccagcctgtccaacacagtgaaacccacctctactaaaaatacaaaaaattagccgggcatggtggcaggcgcctgtaatcccagctactcaggaggctgaggcagagaactgcttgaacccgggaggcggaggttgcagtgagccaagatcacaccactgcgctccagcctgggcaaaagagcaagactctgtctcaaaacaaaaacaaaaaacagccaggcgcgatggctcatgcctgtaatcccagcactttgggaggccgaggcaggtggatcacctgaggttaggagttcaagaccagcctggccaacatggtgaaaccccatctctaaataccaaaaattagctaggcgtagtggcaggtgcctgtaatctcaagaactcaggaggcagagacaggagaatcgcttgaacccaggaagcggaggttgcagcaagccgagatcgcgccattgcactccagcctgggcaacaagagtgaaactctgtctcaaaaaaaaaaggaaagaaaaagaaaatgagagaccattatacgcctaccagaatgaccaaacaccagaatgctgacaccaccaaatgctagtaaggacatagaataacaggaaatctcattcactgctggtaggaatgcaaaatgttacagctactctggaagacagtttggcagttccttacaaaactaaacgtaactctcaccatatgaccagcaatcatgctcctaagtatttacccaaatgaattgaaaacctacacacaaatgtttagagcaactttattcataattgccaaaaccgtgaagtaacccagatgtccttcagtagatgaatggataaataaactgtggtatatccagatgacagaatactactgagtattaaaaagaagtgagttatcaagccatgaaaagacacagggaggctgggcacaggggctcacccctgtaattccaacaccttgggaggccaaggcaggcagatgacaaggtcaggagttcgagaccagcctggtcaatatggtgaaaccctgtctctactaaaaatacaaaaaattagccaggcggggtggcacatgcctgtaattccagctacttgggaggctgaggaaggagaattgcctgaacccggaaggcggaggttgcagtgagccaagatcgcaccattgcactccagcctcggcgacagagcgagactctgtctcgggaaaaaaaaaaaaaagaagaagaaaagacaagacaagacccagggaaactcagtgcatattatcaagtgaaaaaagccaaactgaaaagacttacatactgtgtgattccaattctatgacattctggaaaaggaaaacctatggagactgtaaaaagaccagtgattggctgggcttaggagggaaagagggataaacagacattaagtagaggatttctagggcagtgaaactattctgtatgacactacagatggtctccaacttatgatggttcaacttatgatttttcgactatacaatggtacaaaggtgatatgtattcggaagaaaccatacttcaagtaaacatacaaccattttatttttcattttcagtaatcaataaattacatgaaatatttaacactttattataaaaacagactttctgttagattactttgcccaactgtaagctaatgtgtaagtgttctggcaaattaaaggtaggctaggctaagatatgctgttcagtagattcaatgtattaaatgcatttcaatttatgatggtttatcagggcataaccctgttgaagtaagctcatcatgtaaagcagcatcaatacaatggtggatacatgtcattatacggtggccaaaaaccacagaatgtacaacagcaagaataggatgtagtgtgttatggactctgagtgataatatgtcaatgtaggttcctcagttgtaacaaatgtcccattctggtgggggaagttgagaaaggggaaggcagtgcctgtgtgcaggcagggggttatatgggaactctctgtactatctgctcaattttgctgtgaacctaaaactgctctaaaactgggcacagtggcacacacttgtaatcccagctactaaggtggctgaggcaggagggaccacttgagcccaggagttcaagaccagcctgggtaacacagtgaaatcccccatttctaaacaaacaaatacaagttgctctaaaaaatatagtgtattagtttaaaaaggaagaaagaaaaagaaagccagcaagccagccacccaaggaacaaaactttccagtaaaaacaaagtgtaaataaaattgtatcttgaaaaatgaaattgaaaattgtttctgttcttatatgtaacataatttaggttataatacaactacatatttatgtttaatttgaaaagcaaacgtttaaaatgaaaagtagggagtttgggcacaatttttccaaaaaaattatgatggcaccataagacacaattaacttcctatgtgagttttactgcattaattttacagtatctgaggacttggccagtcttttcatgggactctctccatcttttgatatgattctattttgcagggcccaaggtagcatcctcctcaatggttttcttttcactgttagtgggtctgtggaacgtaatgtcaaaagatgtgtgtgaaacttagtctccaacatttcattcattgaacttcatgaaatcttgtatccttcacaagattttaaacttcatttcacaactgctgtgaccttatcaatcagcaatgaaaataacaaactctaagctgggtgtggtggtttacgcctgtaatccctgctctttgggcggaggcaggcggatcacctgagcccaggagttctataccagcctgggcaccatggtaaaaccccgtggctaccaaaaaatacaaaaattagccaggtagccaggcgtggtggctcatgcctgtaatcccagcactatgggaggccaaagcaggcggatcatgaggtcaggagttcaagaccagcctggccaacatgtgaaaccttgtatctactaaagataccaaaaaaaaaaaatttagctggacatggcatgtgactgtaatcccagctactcgggaggccgaggcaggagaatcgcttgaacctgggaggcagaggttgcagtgagccgagatcgcgccattgtgctcccgcctgggcaacagagcaagactgtcttaaaaaaaaaaaaagaaagaaagaaagaaaatgctaataacatactattgatttgataggcagggacagaagttagtattaagttgtgatgtctggaaatgaacaaattttctaagtggtcagctcattaacaacaactctcatgttaggacaatttttatttttccctataccactcatagttgaagagactcagacaaggatctccgttcatcacacagcaaagaggccaacttaagctaaaaatgacaatttctacacttatccagttccggtgtgccaggcactatcctagtgctggagatacaaagatgaacgtgaaatgccctctaggaattcaatctaacaagagaatggaatgaataaacacacacacaaacgtgttaagggttgtgataacaaggcctgcatgtacaaagtgctaaggatgagacacagaggggaaagaaattcagtatgtctggttctctctgagttaagccttgaaagaggaattttaaaggaaacacaccaagggaaaggctgccaagcagagggtaggggcaaagaaaggcctggaaactgaaaacacaaagctcattcagaaaatgcaggctccagtgtaactagctcaatgttagttgctgtggttctggagaaggagtgattttaaaacagtaataacaaaaagaaccagtctaaaaagttaggccgggcagggtgcagtggctaacgcctgtaatcccagcactttgggaggccaaggagggtggaacacctgaggtcaggagttcgagaccagcctggtcaatatggtgaaaccctatctctaccaaaaatacaaaaattagccggatgtggtggtgcatctgtagtcccagctactcgggaggctgaggcacaagaatcgctcgaacccaggaggcagaagttgcagctagccgagatcacaccagcctgggtgacagagcaagactccatctcaaaaaataaatttaaaaataaaaaataaaaaggtaggccaaggctcaagtttagaccatgcaaacaagtttggattttattttccaatatttgagaaatccatagcaacaagatacagaatggattagaaggaacacacaaaatgcaagaagatcctaaggcacctcctgttctagtgtctaagcaaggacagcaaagggaccagacagaaggtggggatacaaaagtagctcatcaggtttgagttacaactgtgtgcagaggagggatttctgggggaatgcagagttagaaatgatcctggggctctggccaggctgctgctacaaacgcagagcgaaagcagaagcacattcctgggtggggaggagccaaagggttaaatttggaataggaatgcactgagttgaggtggtgaagtctcatcaactactgcagatgcactggcactcagtgaaacacggagctccagaaacggatcggggccaggtatggtggctcaggtctaaaatcctggcactttgggaggctgaagcggaaggactgcttgagctcaggagttcaagaccagcctgggcaacatggcgaaaccccatctctacaaaaatacaaaaattagccagtaatggtggtgcgtgcctgtagtcccagctacttgagaggctgaggtgggaggatcaccagagcctgggaagtcgaggctacagtgagctgtgatcacaccactgcactccagcctgcgcgacagagtgaaaccctgtctccaaaaaaaaaccaaaaaccagaatcagattgggaaatgtcagtaaaatttgatagctggagccataataactgcaactgcctatggagaatcactgaatttcaaccagacgaattcctctccttctccgcacctccaaatgcccttgtgtcttttttaaaagctagacatcacccactttcccatgtcctaaatcacctttttttctccttattaaacttattccataactacgttctctttcagaacacaggactgagagagtgtactcttgcaacattatgtaaaaaggtcatccaatccaaaaggaaagctgtgttttccaagactgctaactcctggagaaaagaaacaagacatcctcaatgctttcctaataactggtttgagcaaaatgcaaaagtttaactgctgagtgactctccctggagaaagccatgaaaatatcttaaggctggatctagggtgtccaaacattttcacaggccgcaggctagagcactggtgcaggagaaggggacaccagagacctggcagttcaggctttgaaggcagtaaacagccactgacctcaggcaagtcacttctcctttaggttttccatttcacagactgatgagtacatggcctaaaatgatcgcccttctagttgagaattttcaggcctaactaaaagtagattaaagtaaaccttggagagagctgaattttttttaagtgccattaagcaattcagggattatctaaacagcctcggttttcttttctctgcttccttaccaactgcctattaactctcactcttagctcataagcagtcagaggggctgaagcacaaagaggaagtgaagctcaaagagttaattttgctgcattagcggctctggtgaaagacagtgggcacagaaaaggaatcaaatgaccaaaactggacttggggattactggtggcagccagccagcaaatttctagatactgcacacaacctgtcagccaattaaaagaaaattggcagaaaatgacggaacacgttctttgtttttgtttttttgagacagtctctctctgtcaaaggctggagtgcagtggcgtgatctcggctcactgcaaccgccgcctcccaggttcaagcgattctcctgcctcagcctcccaagtagctgggactacaggtgtgcgccaccatgcccagctaatttttgtatttttagtagatatggggtttcaccatgttggccaggctggtctcgatctcccgacctcgtgacccgcccaccttggcctcccaaagtgctgggattacaggcgtgagccactgcgcccggcccgggaacacatctttaaaggtctcaatagaaggatgcacacactacgttgaatggttatgtcttcggagcagagtggtgaaagaaggtcagacttctgttaagtctgaatacctacacgcgtacttctgtaattcaaatttaagattaaatattttcaagtttaaaaaaaggaaaaaatggccgagcgcggtggctcatgcctgtaatcccaacattttgggaggtcgaagcgggtggatcacctgaggtcgggagttcaagatcagcctaacgaacatggagaaaccttgtctctactaaaaatacaaaattagccgggcgtggtggcgtgtgtctgtaatcccagctactcgggaggctgaggcaaggagaatcgcttgaacacgggaggccgtggttgcagtgagccgaggtcgcgccactgcactccagcctggggaccaagagcgaaactccgtctcaaaaaaaaaaaaaaaaggaaaaaacatttctaccttactcttattttaggagccacgcctcccacctttgtctagtaacacagctatagtgatgtctcttaggggatgagaaaatgctactcctccactaacaatgactcttggagagggaacaagacatcaaatcgcgaactcgaaaaactaacagaaaaaagttaaaaagtggtttgtgtttttaaagccagccacaacaccttcattcaaggccctaaaccgcagagactttctagacctatcttaagcgtcagtaccacacgcacttcgtgatggaacggtattgttctcctagaacagacccgttttctcatgaaaccgacgtttttacaaaagcctgtttgtggacggcctgcggcggccgcgaacccgcttcccttggattacccagggctgggagaaggagggctttcgccggctgcggtccccggtccccggcctccgccccggccccggctcccccggcccccgacccccccggcccacgccccctgcccggaccccgccccggccccgccccgcgtcacctgactgtcccgcggcccccagacccggcgccaccgacctgatgacactgatgtggaactcgtcctcgcggaggccccgccaggcgccgggcaggaactccttgcaccacagataggccctgcgccgcgtccggggctccggctgctcgtctgcgggcggctgcggcggcgggggctggggcagcggcagcggcagcggcagcggcggcggagggggcagcgcgagcggcggctgttggccgcccagctgcttggactcgaggtcgctggcggcgtcgcgctgctgccccacgccgggcgccggggccgcgctgccgctaccgcagctcagcagcagcccgagcggcgagggctccgcctcgcccccggtgcagaatttggttttcatgcccgacaggcggccgaggaggcgcgggcggccgcagcgcgagaggactaggctcagagtccggccgggcgccccctcgccgctctctcactggcaggccggcggggcagggggccgcggcggttgggcgcgcggggcggcggcggcggctgcggcgactgcggcgactgtggagcggggatgtgctgctggccgctgcactcgctcctctgccgccgccgcacgaggagcgccggccgcgtcacagcccgccctcgcgctcgccactgattggccgccgtccgccggcccggcgcatcataaccgccgccgccctcgccacaccgcctccccattggctgcggcgccgcccccaacccagagcgctgcggcctccgtgagcggggcctgggcgaagggggcggggcgtcgagggggcgccccggcggtcgcagggaagggggagaggggagcgaggcgcggggggcgccgggagagcgcctccgcggtgggacggagccggactgggccgagcgagggaggctcctgagcctcggaggaccccggggttggctttgggagctgaaagtttccttggacccctcggaagccccgtgacatcagaggccgggcctggcaggggcaggcaggaaacgtgtctggaggctactgccctctccgcgtgaccttgggcgagcagcctcctcctggggctcagtgggtgtgattttgtaacatttcccagcgctgccacaggcgcgtctcgccctgtccaacgcggagcccgaagaattactaagaaaccgaggtctgaaggagggaagaggtgacgggctcgaggccacacggtgggccaggctgggcccggctgcacgccggctaccggggcccagccctctgcacgcctcccgcagcctcagtttccctgtccgtggtactgaggatgctcgggcctagaagttcagggctggaggcccagggaccgtcgagggaggggcatcatccccgccatggggccgccgcaactgcccagagcacaggccaaaggtgcgtgccacggggctactggcgttgtggacgctgcccctgcctccccatcccccgcaggaaacagccttgtgaccgtgactaacgcacctttgccggggtagaggggcaagggcccctgctaccgtttgccacacactgccccatgtccctcactgctcccgtccttcctagaagtgaggtgctgatacatataaaaattatggatcccattttatgggacatgagctgaaacaggaggtttcctgggctgccaggggcttaggaaatccagtgcctgatacacaggaaatgcttctatgtggggagttcacagtcttccagaagcaaaaatgttttttggttttttttttgagacggagtcttgctcagtcgcccaggctggagtgcagtggcacgatctcggctcactgcaacctccgcctcccgggttcacgccattctgctgcctcagcctcccgagtagctaggactacagacgcccgccacgacgcctggctaattttttttttttttttttttttttttttgtatttttagtagagacggggtttcatcgtgttagccaggatggtctcgatctcctgacctcgtgatccgcccgcctcggcctcccaaagtgctgggattacaggagtgagccaccgcgcccggccgcaaaaatcttttagagtgtgtacttggctgaacttgctccacgcaaaatggtcttatttaaggataaaaatgaaaggggacttttgtaaggctgctgtggcgacaggcctggaagttgacctgcagggaggtaggagagaccaaggcccctgggacggaggccggccactggatgtttgaaaggctgagaagccaagggcttcaatctggggaggccgtttggataaaggagccaaggactttctctaaaaataccggctcacagggaggtggggccatgccaatggcctgcccaggtgacaagccctttgtcccactgtcccctggcaccagtctggtaatctcaaaggaatgccagaaatctggccaggaggaagggacactaaagtaaggagtggccctctataatttgaaataactctttctggcatctgctggcttttgttaggaaaagcctcagacatttttatgggatcacagttccctgtgggaggaagaggttgcctcaaggccaggcatggtggcttatggctgtaatcccagcactttgggaggccaaggcaggaggatcacttgagccaggagtttgagaccagcctggccaacataacaagactctgtctcgccgggcgaggtggctcatgcctgtaaccccagcactttgggaggccgaggtgggcggatcacaaggtcaggagttcgagaccattccggctaacacggtgaaaccccatctctactaaaaatacaaaaaaaattagccgggcgtaggtggtgcatgcctgtagtcccagctactcgggaggctgaggcaggagaatggcataaaacccaggaagcggaggttgcagtgagccgagatcgcgccactgcactacagactgggagacagagcgagactccgtctcaaaaaaaaaaaaagactgtctcaaaaattaaaaatgaaaaaaaaaattaacagagcattgtgtcttacacttgtccgactacttgggaggctcagccaggagcatcacttgagcctgggaggtcaaggcacccactgcactccagcctgagtgacagagtgagaccgtatttgctgaatgaatgaatcagtgagctcctggctcagcaattattaacttatgactttgggctgagcctcggtttcctcaactataaaatggggattataataccccgagcatccaggattgagagaatgtatgcaaaatgcatagcatgcaagaagtaaccgtttggttgcgtgcagtgcattgcatggcgttgcctctgccagtggttggttttcggagatgaataatgcatgcacttgtagcatttcacagcttgggaagacagtgtcgtataagaaaagaatttgggccgggtgtagtagcttatgcctgtaatcccagcactgtgggaggccaaggtgggaggtttgcttgaggccaggagttcaagatgagcctgggcaacaagtgagaccctgtctctacaaaaaataaaataattggccaggcacagtgacatgtgcctgtaatctcagttacttagaagccggaggtgggaggatcccttgaacccaggagttcaaggctgcagtgagccatgatcacgccactgctctccagcctgggcaacagaggctaggaaaataaaaatacattttaaacaaaaataattcaaacactctgataaccaaaatgtcaatgtctgtgcacaagtagacgagtttgagagaaacttgctatggcaggtaattggaggttgttccaattaccaaaccttttcctctaggataagataaaaaaattatccaaaagctctgtgattgatgctgaattctgagagcagactcagagggtgggtgatgggccttaggagggatagaggaaagattgggaagttcccgtccactctgaatttcctgctgatgggttcctcggggtccacccacgggcctcagccctgccaccaactccaaggcctgttctgagaaagggctttgtgagtctgactccccccaagatgggggaacccactgtcaagcacctggtaggagcaggctttgagccctttcaaagatgctgcatacagcaagttccctaagcagcagtgaggtgagtgtcattagcacttcatctcccaggtggcaagggagcttcccaggggataaaaccattcgttaaaggccagcaggacctgggactccacccaggaccccatccaggggagccttgtccttctgtccttctgcaccataagcacctttggcccaggaagcactagacatttggcacagtgggggttccctcacgggctggagaagcagagccctggcaaggctgtgctcacacctcctcccaggtcacacccaggaccaagcacccctgctccagttctgagccttaaaatattgatgagagcacagaggccacctggctgcaatcctccatgttgaagattgggttgcagtgccagctagcagagtgacatggagctgggctttccctgagtgctgagcgtggccccagcccagctctgtcagcgaaaggctgtgtaggtccagcagctttctggaggtctctgagcacaagtgtggtctgacttggactgacccttctaccatacatttggctcagcacccgcagccagagtctagggcccacagggctcagaggaagcaggtgactagaatatccatctgtctggtgggtggggcaggcattcctcctgtcctcatttgcagggattttgagtataatattatgggtaaaaattctggccaggtgcagtggctcacgcctgtaatcccaacactttgagaggccaaggtggatcacctgggtcaggagttcgagaccagcctggccaacacggtgaaaccccgtctctactaaaaatacaaaaattagccaggcatggtggcacatgtctatagttccagctactcgggaggctgaggaaggagaatcacttgaacctaggaggtggaggttgcagtgagccgagatcatgccactgcactccagtctgggcaataaaagcaagactccataacgcgcgcgcgcacacacacacacacacacacacacacacacacacacacaatctttagaggtcatgctgccacccactgtgtgaccttggacagaacatctacctttctaagccactttcctcatccccaaatggagtcctactctacagggctgttggggagattcaccgaaaccagcaaggaaagagctgggtgtagagccaaagccccacaaagggtatctatgcttttcagcttattgttagctggattcccagagcctggcagagagcagcaaatacccattcatcctaagtgccagtggaagcgcaaagcctgcaggagctctggcaggtctaacagggcctggagagttttccattctttgaagctcctggcacattcaaaaattaagaaaaatctaggcgggacacggtggctcacgcctgtaatcccagcactttgggaggctgaggtgggcagatcacctgaggtcaggagcaagactccatctctaaaaaaaaaaaaagaaacatctcgacagggttaccaaaactggggcatgtttgaaatacttaaattgaacaaatcagtgcttttaacacacatgcaaaagtcccattcaagataattttgcaattctcaaggtaatagagggattactttaaaataataatggagccaaccaagcatagtgacacctgcctgtggtccaagctactggggaagctgaggcaggaggatcacttgagcccaggggattgaggctgtagagacatgattgagccactgactccagcctgggtgacagagtgagatactgtcaataataataataataatggtttgtagagcaccttaagtggtatggtgtgacaaacatctttcaggcctgacaacagatctctgtactaatctgattatccttattcagatgtatctaaatctgaggcccttggggcacatgattgcctcctggggctgccatagtagaccctggcaatgacctagtgaccgttcctctactggagatgatcccctgggcccctcagaatgcatttcctgtgtccacatagccggtgttttaagtcaggtgatctttttttttttttttttttttttgagacgaggcctctctcgttgcccaggctggaatgcagtggtgcaatctcggctcactgaaacttcttcctcatgggttcaagtgactggcctgcctcagtctcccaagtagctgggattacaggtgtgcaccacaacgcccggctaattttggtatttttagtagagatggggttttgccatgttggccaggctagtctcgatatctgcccacctcagcttcccaaagtgctggaattacaggcatgagccaccgtcgccagtcttaagtcaggcaatctaagctccctttccaagtttgttgaaaacctgatttgaggttttgtgctttaagcttgcattacatttgtaacacaataaatgcaatttttggcacaataaatgcaaaattgtggcgcagtgactcatacgtgtaatcctagcactttgggaggccgaggcaggtggatcacctgaggtcaggagttcaagacaagcctggccaacagggcgaaaccctgtctctactaaaaatacaaaaattagctgggcatcgtggcaggtgtctataatcccagctatttaacaggctgaggcaggagaatcacttgaacctggagggcagaggttgcagtgagccaagattgcgccactttactccagcctgggcaaaagagccaaactctgtctccaaaaaacaaacaaacaaaatagaaaataaatacaatttttaaaaagaccccagtcatcatgcaggttacactgtggggataacacttctgggctaggagttgggcaacctgggttcaggcaccgcaccccctctgccggctgcacagggcccctctcccctcagtcagccctgggccctgcaggctggacttttgcctggtagctttgggctggccctcccttctgcaggggaccccttgtacagatgggtaagcagaggcacaggggcacaggcaggacagcggctctgctcacgcaggatgccatggccagtcgtgggcctactccatccttgatcctcccctcccaagggcacttgccatccaggcctgaatggcaagaggcccctaaggggcccccagtcctgtcggcaccccctttgagtgactgacagggaggcaggggagctggcagcccccatccccacaccagcttgtggaagctaccagcgatcggtggggccccactggcagcccgtccgtgtagccttggccgggcccccaagcttcttagaatgccatctaagaaggcagagggggatgagcggcggcggggaggaggggcaggccttgggaagatccactgggtcacagggaagcgaaggcggaccctcctcccccagcgctactgcccgggccgaattccaaggccagcggctgcccgctgagaaggaatccggaccaacgggattctggcttccctctggcccctcctggcgagagcggcgccgggaggagggggcctcagaaggggcgggcaggggcggggcccgcggggtaggcggagctcccaggaaaacagcgggcggggcctcgcgcgaggggcggggttggcggcgaggcgtcccaggacccccattcctccctccgccccggggcttctggggagcggcgcagcttgactgccaccgactgcgggcctccctgccctacaagcccccacccccgcccccccttgggacctggcgaggagttgccccgcaaagttggggctggtgcggggttaaggggattacaattttcctaggacttagtgtgctgaagctgcttttgcgattagaatttatatttacaatgctgataacaataaactacccaggctaccgcgccacgtggacgggggtggtggatggaaagggaaacccttggccaccagcagcctgtgataaggccaaggttccctggctggattgctgcctaggatgcctgtggtccctacccccgcccgggaggcaggattgactaatccgaccaagcaaggcctccaggctgggccaagaaccccttcccagtcctctcccaaagtctatgtccttgggctcacgctgtcctctcctgtccttgcctcctgcatctacagacccctgaggccccctcctccttcagagcatgcacgtcgcaaattctcaatgactgtttggaggaatgaataaatgaattgtgaacaaatggtctgaagattccagaggtagcctaatggggccctgctgcttgagttctaatcccagccccaccagttgttggctatttggccctgggcaggtgattattctctctttgcctctgtaccttgcccgtaaaatgaggagaataccagtacctactgcataaggttgttaaaggattaaatgagtgaatagttacaaagagcctggaacagagtgttcaaagaaacacacagccacagtattaaaaaaattaaaaacccatttctctccaggcttctgccatcactctgtgtgacttcaacattctacctgcatgacctatgcagcacctggccgctgttaccttgccaccctcactgacatcttctctgcataggccttccaccatgccctgtactttctccccactagaaatagccctggctctgaaatgtgttttaatcatcccactttgggtccaccagttcctagcctttgagcttaggcctctcctccaggaccctccctggctacgatttcccaacccctctcgaccttccattcactgaccttgccactttcttgcctcttgtctgcacctctccccatccctagtgtggattccatccccttgtgaacgctgccacccgtcctggcagagactcagtacttccactctctgaatgcatttcttcttcctaggcacaccagaagactacatttcctagccccccacccccttgcagtgtctgggaccatgtgactccttaattaggtcacttctctctcctgggaggccctctctgccctctctaagtctaactagtggcaaaggatctaagggaagaaacctggcagagttactagtcccaagaagcctgggtccctgaatcaccacatggaagtctacgcgcccaccacctgaatggactaaggtatgaacagaagtaatacacacccctttagggccaaggaggtgaaacagctggtatgccttcctcacactctcctctgctttcctggtgacctaggaagctgcaggatgaagacaacagcatcacaaggaggaagccaggatccctgtgttaccacaaggaggagagatgcctaaccaagaccgtctgcaaggattttgtgtgagccagaagcagagctgtatggtgttcagccactgagatttgagggctgtttgttacagcagttgacctatcctgactgacacatcacatcattcctttccccaccatgtgtctaacatgctaccaaattgaattttaagtaaattagtacttataaattaagtacaaatgcttttcaaattcacatgaatctttggtaaataaaactggttgtaaaattattgataaatatagaaatgtctgaaattattgataaaatagccttgtgcaagtaagactaatttaagatcattggttcaatgaaaataactgaatcttctgagttgtcggcaaaatgctcatgtgtttaagattcttagataggtgttcacttaatattcagactttaaaaatgattaaccaggatataactttgaccagcctagtatcatagtttttataagtaatcctgggccgggcacgatggctcatgcctgtaatcccagaactttggaaggccaaggtgggtggctcatgaggtcaggagatggagaccatcctggccaacatggtgaaactccatctctactaaaaaaacaaaaaattagccaggcgtggtggcacgtgcctgtagtcccagctactcgggaggctgaggcaggggaatcacttgaacctcggaggtggaggttacattgagccgagatcttgccactgcactccagcctgggtgacagagtgagactccatctcaaaaaaaaaaaaaaaaaaaaagaattgtggaatcctgctgggcatggtgactcatgcctgtaatcccacactttgggaggccaacgcaggtggatcacttgagatcaggaatttgagaccagcctggccaacatggtaaaacctcatctctacccaaagcacacaaaaaattagccaggcatggtggcagacacctgtaatcccagctactcgggaggctgaggcatgagaattgcttgaacctgggaggtggaagttgcagtgagccaagtttgcaccactgcactccagcctgggcaacacagcgagactccatgtcaaaaacaacaaacaaacgaacaaaaagaattgtggaatgctgctcatccataaaatgctaatatctaatgggcatttcaggatttcttgctttctagatttatataaaatgtgccaaagatgtgttcttattgagaaaaagaagaattttgtctaattcagaagttatctgcccagacgcagtggctcatgcctgtaaacccagcactttgggaggccaagttgggtggattacttcaggtcaggagttcaagaccagcctggccaacatggtgaaacacatctctactaaaaataccaaaaaaaaaaagttatctaaaagtcaattcaaattatggagttaaaagtggttcttggccagacgcagtggctcacacctgtaatcccagcactttgggaggccaaggcaggtggatcacctgaggtcaggagtttgagaccagcctgagcaacatggtgaaaccccatctctactaaaaatacaaaaattagctgggtgtggtggtgggcgcctgtaattccagctactcaggaggctgaggcaggagaatctcttgaactggggaggcagaggttgcagtgagctgagatcatgccattgcactccagcctgggcgacaagagtgaaactccatctcaaaaaaaaaaaaaaaaaaaggtccttaaacaaggttgaaagaaaccattaagtaggggagagagagatgtgaaaaaaattatggatacaaagatgtatttttggcaaagaagcttataaagaaaagacaatacctttatatgagaaaggatcttgtatggaaaattattgtcctagagtagaatgactggttatttaagaaagaggaaggccagatgtggtggctcacacctgtaatcccaaaactttgggaggctgaggcagggggatcatttgagctcaggagtttgagaccagcctggggaacatggtgaaacactgtctccccaaaaatataaaacttagctgggcatggcagcatgtgcctgtagtcccaggtactcgggaggctaaggtgggaagattgcttaagccgaggagattcaggctgcagtgagccaagattgtgccactgcatttcatcctgagcaacagaacaagaccctgtctttaaaaaaggaaagaaagaaggaaggaaagaaggaaggaaggaaggagagagagggagagagagaggaaggaaggaaggaaggagggagggagggagggatggagggagggagggagagagagagaaggaaggaaggaaaggaaggaaggaagacagagagaagctgggtgtggtggctcatgcctgtaatcccagcactttgggaggctgaggcgggtggatcacctgaggtcgggagttcgagaccagcctgaccaacatggagaaaccccgtctctactaaaaattcaaaattagctgggcatggtggcacagacctgtaatcccagctactagagaggctgaggcaggagaattgcttgaacctgggaggcggaggttgtggtgagctgagatcacaccattgcactccatcctgggcaacaagagcaaaactccatctcaaaaaaaaaaaaagaaagagaaaatgaagaaagagagaaatagtctaggacaagtcagaaagtccaagcaggacatagatggtttgtgtaagttgtgataagatttgtaaaggggaggccgggcgcggtggctcaggcctgtaatcccagcactttgggaggccgaggcgggcggatcacgaggtcaggagatggagaccatcccggctaaaacggtgaaaccctgtctctactaaaaatacaaaaaattagccgggcgtagtggcgggcgcctgtagtcccagctacttgggaggctgaggcaggagaatggcgtgaacccgggaggcggagcttgcagtgagccgagatcccgccactgcactccagcctgggcgacagagcgagactccgtctcaaaaaaaaaaaaaaaaaaaaaaagatttgtaaaggggaatttacaaaaacaggaattttgtttgtgattaagttagctgcgattaaaaggagattatttctcctttctaaggaatggtcccctatgttaaaagaaggtctgcttaaggtattgatttgctcttaatgaaattataagaaattttgcttttcaattttttgtttgttagttttgagatggagtctcgctctgtcgcccagactggagtgcggtggcgtgatctcagctcaccgcaagctccacctcccagggtcactccagcctgggcaacagagcgagactctgtctaaaaaaaaaaaaaaaaagggatgaatgagtgcctgtccacctccatttcatctggcctagcatatttaactgtctacacgtcttttgattctaagtctcttggccacagcggtcccacttagggacataatatagccagggcaggtagcacaccaccctggcatcgatatggggcacaataaaagcttggccatgatactgcctctggcataccatgaccagaaaaaaaaaaaaaaaaaaaaaaaaaaacacatgcacctgaaaatctagttgaggccatgacaggaagtgggtagggggagggagagtcagccaggcctcactatatttcctcgccttggaattccacacatattttccctgatggtaccaccaattataattcttcttgtcccccttggagggccttagtccctctacaaacaacagtgtctttctcaattcccataactgctccccataatactggtatcacattaaattactactttccccccatcccattcatgcttaaaccaaagcaccccttgaataacacaggtacttaacctttttttttttttttgagacacagtcttgctctgtctcccaggctggagtacagtggcgtgatcctcagcctcccaagtagctgggattacaggcatgtgccaccacacctggctaattttgtatttttagtagagacagggttttgccatgttggccaggctggtctcaaaactcctgacctccagtgatccgcctgccttggcctcccaaagtgctgggattacaggcgtgagccactgcgcccagcggtacttaaccttaacagctcccatcccattccagtctgtgacccacagtggatatctgtggctatatggatgcccactaaatcaatcagcctataaacaactcattcctcatttgagaccacgggtaccaatgtgttgataacatttggctcaaaggtcaacatatagtaagacaggtgaagccggccgggcgcggtggctcacgcctgtaatcccagcactttgagaggcctaggcgggcggatcacgaggtcaggagatcaagaccatcctggctaacatggtgaaaccctgtctctactaaaaatacaaaaatagagtcgggcgtggtggcaggcgcctgtagtcccagctactcgggaggttgagacaggagaatggcgtgaacccaggaggcggagcttgcagtgagccgagatcgtgccactgcactccagcctgggcgacacagcaagactctgtctcaaaacaaaaacaaaaacaaaaacaaaacaaaacaaaaaaaagacaggcgaagccttctaatatacaattatacaacatcacttgcccaagcactaagtgagcaattggccttctgttgtctggggtcagggctgctgtgggcttgttggccccatggggaggatttgcctaacatgaggcaactcttcaaaactttacttttcactctacataccttcttataaaatgggagatactttagataaattgagactctctcgattctatagcagatatagttatggataatagattggcattagactatttgttggctgaacaatgacaggtatatgctgtgattaataaaacctgctgtacctatgtaaacaactcaggtcaagtagaggaagataccgacaaaatatatgaacaaggctgggcacagtggctcacgtccagtgcttttggaggccaaggagggtgaatcacttgaggtcaggagttggagaccagcctggccaacatggtgaaaccccatctctaggaaaaatacaaaaattagccaggcatggaggcacatgtctgtaatcccagctactccggaggctgagggaggagaattgtgtgaacctgggaggcagaggctgcagtaggccaagattatgccactgcattccagcctgggagacagagtgggaccctgtctccaaaaaaaaaaagaaaaagaaaaaaaaaaaagggccaggcatgttggctcacgcctgtaatcccagcactttgggaggctgaggcgggtggatcacaaggtcaagagatcgaaatcatcctggccaacatggtgaaaccctgcctctactaaaaatacaaaaattagctgggtgtggtggtgcacacctgtagtctcagctactcaggaggctgaggcaggagaatcgcttgaagccaggaggtagaggttgcagtgagccaagattgcgccattgtactccagcctggcaacagagcaagactgcgtctcaaaaaaaaaaaaaaaaaaaaaaaaaaaaaagaacaagccaagtggctacatggtgttcacaaccccaatacccagactactatgcggaattccataaggggtttctaccggcagtgacttggtttttacctaggacctttaatagctctcttgttactattgatctttgtttggcctttacttatttaacctcttagtaaagttcgtgtcttctagattataacaattccatgtggaaatgatgcttgcactaggtttctgacccatcctgtcttctagcctggaaaataaagatctcctgcctttggggtccttagatcaggcaaccagagattttcactcctccaacaccaggcagagcctatgcccataagatcagcaggaagcagttgtagagggtggacctctgcccttctaccactttttaagattaaggaggagtctgacgcctgtcatcccagcactttgggaggccgaagcaggcggatcacctgaggtcaggagttggagagtagcctggccaacatggtgaagccccgtctctactcaaagtacaaaaaattatccatgcagtagtggcgtgcgcctttaatcccagctactcaggaggctgaggcagaggttgcagtgagccaacatggtgccactgcactccagcctgggtgagagagcaagactctgtccaaaaaaaaaaaaaaaaggtctggtgcgatggctcacgcctgtaatcccagcactttgggaggccgagacgggtggatcacgaggtcaggagatacagaccatcctggctaacacggtaaaaccccatctctactaaaaatacaaaaaaaattagccaggcatggtggtgggcgcctgtagtcccagctacttgggaggctgaggcaggacaaaggcatgaacctgggaggcggagcttgcagtgagctgagatcacgccactgcactccagcctgggcgacagagcgagactcgggctcaaaacaaaacaaaacaaaacaaagattgaagaggactctacagtctctccgggaaggaataaggttagagatcagcaggacttgttttctgagcaccagtcacaagaccttgctgaacaaaacatgatctgatcaaaagaggatgcaggaaagacattggccaaaactagctaaaaccaacacggtgaccaaagcaacctctagatgccctcattgttcattgtgcactaattataatgccttcgcatgctgaaagacactcccgccagcaccgtgacagtttacaaatactgtggccactcccagaagctaccttatacagtttaaaaagggtagaggcccagtgtggtgtttcacgcctgtaatcccagcactttgggaggcgggtggatcacgaggtcaggagatcgagaccatcctggctaacgtggtgaaaccccgtctctacgaaaaatacaaaaattagccgggcgtggtggcaggcacctgtagtcccagttacttaggaggctgaggcaggagaatcgcttgaacccgggaggcggaggtttccgtgagccgagatggcgccactgcactccagcctgggagacagagcaagactctgtctcaaattaaaaaaaaaaaaaaaaaagccaggctggctcacgcctgtaatcccagcactttgggaggccgaggtgggacagatcacctgaggtcaccctgaccaacatggtgaaactccgtctctactaaaatacaaaattagccaggcttggtggctcatcgcctgtgatcccagctactcgggaggctgaggcaggagaatcacttgaacccgggaggcggaggtttccatgagccaagatcatgccactgtactccagcctgggcaacaagagcgaaactccatctcaaaagaaagaaagaaagaatgaatgaatgaataaataaataaaataaaaattaaaaaaaggtagaaacccttgcttccagaaactccccactccttttgcagaaaactcgtgaatagcctgtcctttatttagcatataatgaaggaatagacataaatatagctggccagcaatccacgagggctgccgctactgctctacggagcagccattttcctgcactgttgctctaataaacttgtgtttgctttgctctgtcttgtttgctcacccttgaattcttttctctgcaaagccaagagctctcccagtctgagccccaatcatcaaagatgattttgagggcttcagtatttaaaggggaaaagcaggctggaggggaaggagggaggggatggtcacattattaaatccgtatgttggaagagaaaaggagcagggaggggaatagtgacatattcatctagtgcttctacatcggcattttacacaagataaggtgaatgcagagtgtagatatttaaccttttatccgtggctctctgcttaggaacaaaaggagaagcagcttcttgcctgactcagctttcagcttaatttttttcttttggcagagtgaattgggattccaagattttatttgcctttcccatcatgcgattggataccacaaagcagtgaagaacagtgagtgcccatgtacttgacaatgaaggggaatcttccagacatacatgaagcgaaggaaggcaggcaaaagagtgtgcttgtgtgatactgcctatttggggctctagaagaggcaaaactaatctatgggagtttgaggataatgttcaggataatggtttacttttggcaagtgttgtctgagaagaggcacttgggagccttctgggggctggaaatgttctgtatcttgagctaggtggtgggtacacaggcatatggcttgtcaaaaataattgagttagccgggcacagtagctcatgcctgtaatcctagcattttgggaggccaaggtgggtggatcacctgaggtcaggagtttaagaccagcctggccaacatggtgaaacccctgtctctactaaaaaaaatacataagattagctgagcatggtggtgggcacccgtaatcccagctactcgggagtctgaggcaggagaatcgcttgaacacgggaggcagagtttgcagagagccaagatcacgcaactgcactctagcctggaggacagagcaagattccatcttaaaaaaaaaaaaaaagaaggccaggagtggtggctcacacctgtaatcccagcactttgggaggccaaggtaggtggatcaccagaggttgggagttagagaccagcctgaccaacatggagaaaccctgtctctactaaaaatacaaaattagccgggcatggtggcacatgcctgtaatcccagctactcgggaggctgaggtaggagaatcgcttgaacccgggaggcagagtttgcggtgagccaagatcgcgcaattgcactccagcctgggtgacgagcgaaactccatctcaaaagaaaaaaaaaaagaaataaagacataaaagatacttggggctgggcacggtggctcatggctttaattccagcactttgggaagctgaggtggctagatcacttgaggtcaggagttcaagaccagcctggccagcatggtgaaaccctactaaaagtataaaaattagccaggaatgatggcaggcgctaatcccagctactcaggaggctgaggcaggagaatcgcttgaacctgggaagtgaaggttgcagtgaactatgattgcgccactgcactccagcctaagcgacaagagcgaaactctgtctcaaaaaaaaaaaaaaaaaaagttgagtcatgttgtgaatgtatttaacaccactgagccgtacacttaaaaatggtgaagatgttagattttatgttatatctattttaccaccatacaaaaaaattgagttataccttaaggtttgtggactttattacatgtcagttgcacttcaactgaaacatttagcacgatcgttgcccctggctcctgagtaatttttttcatttttcagacatgaggtctcgctctgtcgcccaggctggagtgcagtggcacaatcatagctcactgcagcctcgaactcctgggctcaagtgatattcccacatcagcctcccaagtagctgggatgtcaggcataataagctactgcgcccgtccccccaagtcattgcaaatgttctttgaaaataccaccttcaggccaggcgcagttgctcacgcctttaatcccagcactttgggaggccaaggcaggcagataacttgaggtcaggagttcaagaccagcctggccaacacggtgaaatcctgtctctactaaaaatacaaaaatgggctgggcatggtggtgcatgcctgtagtcccagctattcaggaggctgaagcaggagaattgcttgaacccgggaggtggaggttgcagtgagccgagattgcacccgcagcctggatgacaaagcaagactccatctgaaaaaaaaaaaaaaaaaagaaaataccaccttcagtggccacatattttcccatccacggatgtgtcctggtaccttcattcactctcaaatctttccccagaattgtgagaaccacagccccatgtcacagccccaaggttgcagacaaggtcccgacccacgttaagacgcaaaataatttattggaaggtttttcttagacccctgggaaggctaggaaacctggcttggaaagaaggaggagctcaaggaggcaggaagctgccccacagcctgggttaccccaggaataggctggtctaggggccgctgtaaccactgctgacactgtggatgtcaccatcagggacagtgccactctgggacgctgcagccatagccactgggaagaggtcccagtgggcccggattctttgtggaggaatctataggcctgagctctagaggctgggaaatggaggggcaagtctctggtccccatgctcaacaagaccccctcagtggggaattcctcattgcagaaggggcaccagatgcagggcagctaaacaagcagccagggattcctaccccgagaaatgtcctctaagacaataacagccagtatttgttgagctctcactgggtgccaggcccctgtgccaaacttcctacatggattatcacaaagaatactcacattagccctgtggggtgggggttattattatcttgattttgcagacaaggaggcaggcacagagcaatttggcaacctgcccaggaccacacgcatgaggagcaggaggcggcattgcattgggggcacctgtgtgccaggtcagtgcagggcactttgcagtcctcttagggctgagggccttggacactcagcaccattttccctgctctgtggctgcagggggctgcaggggctggaagcctgacagccacgtttccttgaagcccctgcagcagggttctgggttacagcctgtcagtcacgggcatttgcctgacacctggaaggctgtggggaggtgcagtggcaggcaggggtgggctttgccagatgtgacactttgccagtgacttctgggggtctcctggggctgaccagcccccctccgagtggtgcatgctcctgcaattcctccagtcctagtttcttttctttctttttcttaagacagggtctctttctgtcacccaggctggagtgcagtggtgcaatcatggctcattgcagccttgacctcccaggctcaagcagtcctcctgccccagcctcttgagtagctgggaccacaggcgtgcaccaccatgccaggctacaaatcctaacttctggaccaggtgtggctgcccctcagctctttggaaggttttgcaagcctcaaattccccgtgttcagtcctttcctgcttgaaatgccattttcccaactgaaccttgatgaggcagaggtgttaaggcaaagcagctgggcctataggcctgagctctagaggctggggaatggaggaacaaggctctggtccccgcgctcaacaagaccccctcaatggg

SEQ ID NO: 6 - DNA, 135705 bp, Homo sapiens
tctttcaccacgtccgtgccaacatcaatttttgctttttttgtttttgtttttgttttggttttgagatggagtctcgctctgtcacccaggctggagtacagtggtgcgatatcagctcactgcaacctctgcctcccgggttcaagcaattctcctgcctcagtctcctgagtagctgggattacaggcaactgccaccatgcctggctaatttttgtattttcagtagagactcggtttcaccatgttggtcaggctggtctcaaactcctgacctcctgatccacccacctcagcctcccaaagtgctgggactacaggcgtgagccaccgcacctggccctatttttgtttattttacacgtggtattgcattgtgattttgatttgcatttccctggtaattagtgatgttgagcactttttcatgtgtttgttggccatttgtatatcttcttttgagaattgtctattcatgtccttggcacgctttttgatgggattatttttttcttgctgattagagttccctgtagattctggacattagtcctttgtcagatgcagtttgtgaaaattttctcccactctgtgggtgatctgcttactctgctgattatttcctatgctgtgcaggaggcttttagtttaattaagtcccatctatttatctttgtttctattgcatttgcttttgggttcttggtcatgaactgtttgcctaagcaaacgtgtagaagcgttttccaatgttatcttctagaatgtttatggtttcagaccttagatttaagtctttgatccatcttatgttgatttctgtataaggtgagagatgaggatccagttttattcttttacatgtggcttgccaattatcccagcactatttgttgtatagggtgtactttccctactttgtttttgtttactttgttgaagatcagttgggtgttaagtatttggctttatttctagcttctctactcggtcccattggtcatgtgcctatttttataccagcaccatgctgttttggtgactatagccttgtaatatagtttgaagttgggtaatgtgatgcctctagattggttctttttgcttagttttgctttggctgtgcagactcttttttagatccaattgaattttggcatttttttttccagttctataaagaatgatgatggtatattgataggaattgcattgaatttgtagactgcttttggcagtatggtcgttttcacaatattgagtctacccatccatgagcatggaatgtgtttccatttctttgtgtcatctatgatttctttcaacagtgttttgtagttttccttgtaggggtctttcacctccttggttaggtatattcctaagtatattatttttacagctattataaaagggtttgatttgattctcagcctggtagatgttggtgtatagcactgctactgatttgtgtacatagattttgtatcctgataaatggatttattgtatatttctaaatagcaataagatttgaaatattcccaacacaaagaaatgatcaatgtttgaggtgattaatatcctaaagaccctgatttgatcattacacattgcatgcatgtgccagaatctcacatggaccccacaaatgtgtacaattattctctatcaaaaacatttttttaagaaacatgcaggaatacactgtacctcttccttgctgtctctggatattgtcacatgaggacttgacatgcggattgtggcagcctctgtgaccaagagcagaagacaatagcagcatagaaacctcaaatgaaaaacctaacatctcaagctactaatttagccaaccttggcatcagctatctccggtcttagtacatgaggtgataagccccactgttcaagttgggtggccatcaattgctgcacaatagaagttaatgaggcttcttcctcctggaacccctactagaccctgacatacccattcagtcacaggcagaaagggaagcagagggtaaggagacctggctggctgtgccagatgcagatcttacctgtcctgcttagaacattcaaagctcaattggttaaacaaaaaaaggaaaaagacagtaaggagtataacactccccagatgcaacttaatctaacactctatactttaaattttctaaacatacatagaaatcagaccactacttctgcagaacattttactggtaaaaagaacagcccacatgagggaaaactgatttggtggaaagacaacaaaaacaaaacatgggaaataggtaaggtgataacatgggggagaggttttgctcgtgtttcaccaggagaaaatcagcttcctgtttggatacccactagacgtttgaagttctacaatgaacccatcagagatgcaaatgaaagtgcctccgcagagacagaaaacccacaatcgagcatcatcgacccgcagggtgaacaaaatggtgatatcagaagaacagataaagttaccatccaccaagaaaacagcacatgtggagagccagggagaagaatagaaagaaaaagagacagagatcagagacagacacagaaagtgagattggggagagagatagtgtaaaagagagagagagagagaccataagagaagggagacaaagagataaaaggtgcgagtcagtaggtgaggagaaagactgaaaactatgagaaacagcaactaagacacaaaggaggtgggagactgcccgggtgccgcagcacccacaccgtcctcttgccccctgtcacttgggttaaaaccaccggaaattccactattgcaaattttatattaatccttgtatgtctgacttttctattgttagtctacaggtgtatccagcagctccagagagacagcgaccagggagaaggggccatgatgatggtggtggttttgtcaaaacgaaaagggggatatgtaggggaaagaaagagagatcagactgttactgtgtctacatagaaagggaagacataagagactccattttgaaaaagatctgtactttaagcaattgctttgctgagatgttgttaatctgtagctttgccccagccactttgccccaaccactttgacccaacctggagctgaaaaaacatgtgtcgtatgaaatcaaggtttaagggatgtagggctgtgcaggacgtgccttgttaacaagatgtttccaagcagtatacttggtaaaagtcatcgccattctctagtctcaataaaccaggggcacaatgcactatggaaagccgcaaggagccctgcccttgaaagctgggtattgtccaaggtttctccccatgtgatagtctgaaaagtggcctcgtgggatgagaaagacctgacggtcccccagcccgacacccataaagggtctgtgctgagatgggctagtcaaagcggaaagcctcttgcagttgagatagaggaaggccactgtctcctgcctgcccctgggaactgaatgtctcggtataaaacccgattgtacatttgttcaattctgagatgggggaaaaaccgccctatggtgggaggtgagacatgtttgcagcaatgctgccttgttattctttactccactgagatgtttgggtggagagaaacatcaatctggcttacgcgcacgtccagtcatagtaccttcccttgaacttcattatgacatagattctattgctcacatgtttgttgctgaccttctccttattatcaccctgccctcctactacattcctttttgctgaaataatgaagataataatcaataaaaactgagggaaatcagagactggtgccagtgcaggtccttggtatgctgagcgccggtcccctgggctcactgttgtttctctatactttgtgtcttatttcttttttgtctctcatcccacctgactagaaatacccacaggtgtggaggggcaggccaccccttcattatgagattacaggcaagaataaccccacctggccacctaactcactcttgagaggccagaagtgatgctggaattttcttcctctgtggtttaaaaagggaaaattagggagaacacaaggcatgagcgatgcagcaatggatatgtctatatggagcttctgtctgcatccagtagaaaatgcatttctaggcatcaggtttaagagcgaaaacctggagtcttgtctgttagcattctccttccccacaaaccagagagggaatacattttgctccagcacatccggatgtaggaaatgtcacattcctatttctgtaacttcacttaaatctgctctgagtccctggatgcctggcaggtggagaattcaatcttgtcgttaccagcattgctttcccttctccatgggcttatgtaagaattctgggcttacacactgttggaaagccaggtaggaactacttcccccgaactctccattcttccagctgctcatgatccatcagccttttttgggccatctgctataacaagaccctcctcacagcatcattccactgacccacaggctcagccccagggaccctcactgtaacaggtctccactatgcataggaactcacaaaaaccttctcttcatcttggcttcctctgatatccagccactcccctcttctcaccttaaacacagatggcagctccttcccatcattccaacccttggggattgtccagccaaattctcttcagacaccaaagcttcacccaccctcttcatggagatgatgcaagggcatctgagatctttggaagcccaattctggcctctctttggggtgggctgagagtgggaactagactctcttttccaagtgccatgtttatcttgttcatcattatattatctccaatgcctggcacatagtaggcactacagactgacacatagtaggtgctattagtgtctgtataatgggactcttgaggtcgaagctattagcagaaacctaccaagcaaaaggatggaaaaccgaccaccaaaaaaaaaaaaaaaaaaaaaaaaaaatgaaaacaatcatggctttgagctctaaacacacaaggcaccagcccaagtttgggcaattttaatacaacagccattttgcctccaaacaaactggcactggaaacctccgtctgcctcttaaagagaaccagtttctctttctctaagtgggcagcatttctccccggtgacagtacccagcccactgccaccagcaaaggactgcagccaggagccaagagcttgatagtttaaagaatatattttatagggaaaaacaaagtaacatccacataaatctggaagtaccaccactttccagaggccgaatcccatttgtggagtctcttgcgtgtcaagcaccttgcagtcacctcaactacatacttttgggattcgttgcagagacgagtgaaggttatctgcaaaacaaaggaactagggctcagaattccccgagcaatccatgacagaggaggtgagtagaaaagggaagggtgaagtcaaagagagaattcagtgaattggccaacaccaagcaaggatcatgggaccctctccatggctccacgtctcaaatgaagtcaataaaacccatcaatgcttggtgtaagtgttgtatgctcccggaaatgaaagcaggggccacatttcaggtcagcagggtcgggggtagaggcaaaggtcatggacttgtgggccctggaggatgggatgattctgagacattgaatccctacactgatctcagtagaaatctcaggtagggcttcaacattcgtggcccaaggactctgtgtgcctgagagcaaaagccttggtgcatgtcccggctccatcaatcccaactggggctttgaacaagttacttatttttttaactaacgttattttaattgacaaatcataattgtacacatttatgtgatgttttgatatgtgtatacaatgtgggatgattagatcaaactaattaacatgtccatccactaatttactgacaatttttatgatgagacatttgaaatgtagtctcttagttattttgaaagatacattattattgactatagtcacgctgctgtgctatagatttcaaaacacataatccagcaacccaacttctgggtatagacaaaaaaaaatcgaaatcaatatgtcgaagggatccctacattcctatgttcactgcagcactattcacaatacccaagatatagaatcaacctaagtgtccatcagtggatgaaaggataaagaaaatgtactatatacacacaacggaatactattaactcttaaaaaagaaagaaatcctgtcattttcaacaacatagatgaacttgaaagacattgtgttaagtgaaataagccaggcacagaaagacagatactgcatgattttattatatgtggaatctaaagaagttgaactcacagaaatagagagtaggacagtggttatcaggggctggggtggaggaaaggtaggggataggagacactgctcaaagggtacaaagtttccaatacgaagaataagttttgaacaagctaaactcctctgaaagctcagttcctcatctgtagagcggggacacatcattaaccttctaaggatgttgctgtgagagtaagagatgatgttcagcacaatacctaatgcacagtcaggtcttcttaagcttgaacctgcatcgccatgacctctacatcacaggacagaaaggctcacagccagtgtctcagttcccagtgaaaagtggatcccagaccaggctgaatagcaggatccctaggggatactccaccctactgagtcagaatcaccggaggtagagcctgggtatgtatgtatgtgcgcgtgtgtgtgtatgtatgtatgcatgtatgtatgtatgtatgcatgtatgtatgtataagagacagggtcttgctctgtagtccaggctagagtgcagtgtcacaatcatagctcactgcagcctcaaattactcctggcctcaagccatcctcccatctcagccttcagagtagctgagactaaaggcgcatgccaccagcccagatactttttttttccttctttttggagagagtctcactctgttgcccaggctggagtgcaatggtgtaatcttggctcactgcaacatctgttctcgggttcaagtaattctcatgcctcagcctccggagtagctaggattacaggcatgcaccaccacaccaggctaattttgctctttcattgttgtttcttgattgtttttcacaaataggacttcttatttgctactgttttaagcctgaactttaaacagattcttggactggtggttcatatccatcagctcattcaactttagcatgtgtctcgtccctagtgggttttccagaactactaccatcaccacgaagctccatgcctttcaaacccagggttctccagcatttttatttttctaatgaagacatcatggagaggataaattggcaagccttttctacatcttttccaatgttgtctggaatcaatttattaaccacttctttcaagtcatttgtctgcacctctcaggtcatgatttccatcatcttcttctggatttggcagactgttggtgctaagcataagaggtcttcagtatcagattgttgtgttttttagtaaaaccaacacaaaacataagaaagaagtaaccatcggtagtcttgacatcaacatgagcttcgatcattgttgaacatttttcaaccttggaacatattttgtcacaggtaagacccatgccatagaagttagtcaggcaatttttgccctgaacatcttcagtaatcagcttgaattttctaaatgcaacttcatcattctgcaaatctgcaagactcatttcaaacacaagacccttgagaccatcagatgcaatttgggttccttgggtcctggtgaccaagtctttccaatatttcttatattgaacatagcaggtgctttcacatcatactgatctttcttagagaatggaccaattactttcttcttaactccctttttgccacctttcataaggcacttgttcttaacaaccgccatggtgctgctcagagtaccaaaaggctaaattttatatttttggtagagaaggggtttcaccatgttggccaagctggtcttgaactgatatcaggtgatctgcccgcctcagcctcccaaagtgctgggattacaggtgtgagccactgcacccagctgatatttattttttatttttttgtagagacagggtcttgccatgttgccaaggctggcctggaactcctggcctcaagcaatcctcccaccgcagcctcccaaagcactgggatttcaggtgtgagccaccgtgcccagcctggaatctatttttaaagccaatcaagtgttgaataaaattgcaacttgggctgttttttcttcgcattttttacatttcaatggtttttaatatattcagagatatacgcaaacattaccagtcaattttagaacatttcatgacctcaaaaagaaacctcataccctttagctaacaccccctatcctctcatgcccctagcagccctaagcaaccactaatcgacttcctatttctatagatttccatctgaatgaaatcatgtagaatgtgatctttcatctgttttgaaggttcatccacgctgtagcgtatgtactttccttccttttgtgatcaaataatattccaccatgtgggtagacaacaaccggtgtatctcttcatctggtgatgggcatttggattaattccctctgtgggttattaggagtgatgctattgtaattattcatgcacaaatttttgtgtggacctgtgctttcatttttgaatatgaaaatatggcacatctccaaggaagacatacaagtggccaataagcacatgaaaagatgctcaatgaaattcatcatcagggaaacagaaatcaaaaccacaatgtgataccacttcatagccataaggatggctagaattgaagatacagaaaattggcctggtgtggtggctaatgcctgtaatcccagcactttgggagaccgaggcaggtggatcacctgaggccaggagtttgagaccagcctggccaacatggtggaaccctgtctctactaaaaaatacaaaaattagccaagcatgtggcaggtgactataataccagctactctggaggctgaggcaggagagtaacttgaatctgggaggcagaggttgcagtgagctgagattgtgccactgcactcctgcctgggtgacagaacaagactttgtctcaaaaaaaaaaaatacagaaaataacaagtgttggtgaggatgcagagaaactggaactttcatacactgctggtaggaattagaatgctttagccactgtgagaaacagtttaacaacttcccaaacaattctacatagagcccaacatgggctcttttaatctatggaaaatgaactatgggtacttggcaagaacaaagagggagagaggaagaaatggtgccatgagggcacattgattggtctctagtacacatggctcctactgcaaatggtctctaaatgacttcatcagttgctcataaaaaaaatcaccctctgctccaatcgtggaggaagaagtatggattggacctggtgagccacggtaagactgactgctaaactttatgaatgatgaggggatttgcacgtataatcttgactgtactagattttttattttatccactgtctttgaaaacctaactcttgactaagaactgactttcctgtacttgcttttgactctaagtaaatttccaattcctcatagtccaaagatgatgttttgagaaatctctcaaaggaaaaatgctaatacaggaagagttatgcggcaaattttgcagaatttacacaaactgtacttgtaggtacgaagcacaaaacattttcatgagtaaagaaaaaagtgctgttcattctagtagaggctgcaggatgaagccgatcaaggtgcttgcccagccagaccttgggctcttaccaaatttgtgttagagtcaactctgatggagtctgtatctcagtcatcttttttttgacatggaatctcgctctgtctcccaggctggaatgcagcggggtgatctcagctctctgcaacatctgcctcctgggttcaagcgattcccctgcctcagcttcccaagtagctggggctacatgtgcgtgccaccatgcctggctaatttttgtatttttagtagagacgtttcatcatgttggccaggctgtgctctaactcctgacctcaagtgatccacctgccttggcctcccaaagtgctgggattacaggcatgagccaccatgctcgacctcagtcatcttttatcctccacacctggcaagttctagacccactgcggttccatacaagttttttgaataaataggagacagatagaaagtgggaactctggaagtagagaagattccagaaattgtgcatatttcccagagactggccaaattcctcagtcctgccagagtttctctatctcaactcaaaccttacgtgtgggcccagacacagtggctcacacctgtaatcccaacactttaggaggctgaggtgggcagatcactagaggccaggagtttgataccagcctggccaacatggtgaaaccttgtctctactaaaaatacaaaaattagccaggcatggtggtgtgcacctgtagtcccagctactcacggggctgaggcacagcattgcttgaacccaggaggtggagtttgcagtaagtcacgattatggcactgtactctagcctgggcaataaagcaagactgtctcaaaagaaaaaaatacccttatatgtgggccttgttacagaattaatgtttatatggacaatatgtacatgggtgtatgttaagagcatgagtcatccacaagattttagcaaagtccatttagaaagctcaatgctttgggcttccacttgccttgctgcctgtgtcctcagaaggaggcttcatccttccatgtaaccagcaaatcctttatgcagagatgtacacaacacactcctatccttggctataacaccttgaaaggttcctcttggtggcccctggtgctcatttcagagtagttcaaattaaggtgatcagctttcatgccaatcactctacaaatcactcctattatgaccaatttttctaaatgctttattgaattattacttaaagaaatgtgcacgtagaagaggtcaacactacttttcttacaaactgaacatactggccaggctcagtggctcatgcctgccatcccagcactttgggaggccgaggtgagcagattgcttgagcccaggagctcgagaccagcctgggcaacatagtgagaccccccactctacaaaaaataaataaatacaaaaattaggcaacagtgatggcacatgcctgtagttccagctactcaggagggctgaggtgggagggctgcttgagcccagtaggcagaggctgctgtgagccatgacggtgccactgtgctccagcctgggtgacagagtaagatcctgccaaaaaaaaaaaaacaaaaaactgaacatctccatattaccgacacccaattcaagaaacagaacattacagccccttccaggatattcctggggtctcttccatctctactaacccctgactacaaacagcctccacctatttcacctgacattgtactttatgaaagcagcagttctcagatggggctattttgcctcctggggacattaggcaatatctggagacactgggggttgtctctacttggggggagttgtgttactgcatccagtgagtccagggatccagggatgtcgctcaacatcctaaaatgcatagggaacccccacacatacaacagagaaattgctgagccgaaatgtcagcagcgtcacagctgacaccctgacatacacacaatcacacagtatctgctctttcgtgctcaggatttctgtcattctaatcatttcataggaaacagaaatgtcatttggaggtaggtagagtccaaaacaaagaagattcagagttttgtttttaatcagcctggtgcctttagagctaggatttagtttccattctttctgtctcattttcaagtgatttttcttcaactggcatctgctgggctcaagacccggagatccccacaaagctgagattcacatgggaattttgtatacacccacacagctatacactgccatttacatgcagacatccacccacagatacacacatccggagaccaagacagaaagcaaactccaccataaaagcacggttccccgaacaggagaaacgcaccattcactcaagggaggtacctatttgtttaattcagcctgtgataggctgttgccaagcccagctctgaaagtcttcccctctaggaaaagagatggattttttctttactcaagaatatagatctaaaaaaaacaaacacttctgcatctcaaagcaggctctacctcctgagctacacatattgatcagcattttattgtcaattttcttttatttgaactggataaaaatataacctaattgtgttcttactgacagtttggaatcagtcacactaaatccaattctctgggttctcatggttaaggtgtttaatttgggggacaacaaagcaaaagcattggtcatgttttaatataattagtacaggatatatctaaggggttcaagtatcactgtagcaagaagctcattctgcagtaaaagggggattctgccactaggattgagtgagggtgattcatggctgcaccgtttcatcaatgtctcttcaagagtccatggaatgtggaatgggaaagactgaaatagtccaagtcttggctaagcttctattaaggggtgttaggagctgataaaataacctggtctttatagacatcccacactgtagttctgtaagctacagattctcagatttttctattttataaaccagtaaaaatattttattaatttgagaaccaacataaggttgctactttattttctttttggtaagaaggaacttttttaaactaccagtttcacacacacacacacacacacacacacacacacacacacacatacacacagaaattccaccatgattggtcagaataggtgaggttttgctgcaataacaaacaactcctaaatcttggtaacttcaaacatcagtagttgtttttctcactcatgctacatctgcagggaggtgtggggtgctctgttttccatcaaacttgccctaagactaaggctaatgggggctgcattacctcgagtatcaccaagcagggaacagcgggacaagaatgctagagagccttgtactaagaattaaatgctccaggctagaagtctcacactgcacctctgcccccagcctcttggccagtactagcaacatccccttccccaccacagggcaatgcatgaagacaggagaatttgatacattacaaatttctaccccatggcatttcataaaagagaaaaaaatgcaaatacaaaaatgttttaatagaatagaatatatacatttttggaataaagaacaatcctccaaaaaggacagctggtggtctttcaccaatgggcacatttctgtgacattttctctgtttttccattttatccttgacctatgaacattttatacagatggtccaaagaacaccatgtggggaccactgctctaatcaggtgatgaaaacggccccaagaacagagcacagtctctttagcaaagacccagcagggccagggtgaccatgttctcaccatcaacgtgcagacatccacctgcagcatcctcacatcccaacatcaaacagtggctctttatagcttgattctaatgccctttgatcttcataatcattgtaaagttctctggccccaagatctaacatcgccactctagctacatcctgcaactgttcatctctcctgcctcctcatccctctaaacttctcttcacaacctcatgtttccttcttgctttaccttcctgctcagcctggaccttacagtcaccttcttcttgtaatgtgctcctgaactcgttcttccctgccttcaaccacacccacctggaaaatctccataccccattgatgacttgcctcgcaactgcccaagggctgctgaatgatactggaaagaatcacaacatggatctggtagttccactaaataatctcaccatccaactctaggatagacttcacttctgttcagcaatatttttaagcatcacaaataaattccaaaccatatttgctagaacaactgactttaaacctcttacatatctcaaagccccccaaacccatccctagggatttcagagcccagagttgagttctctcaactcacttccatctcacccctagatcactgtaccttgaccctcttcctctgcctttcccatgttataaggagaagcatccttctcctttcccaagctaccttctccacttgtgcctcatttgagacctccctttatcacccgttcccttggaactcccatgactcaccaccttcacttgtcatttcactcataaatattttgcaccatgtatgtgccaggcgtttaacatagaatcatgcttaagtctctacatgctaacaagaaaaaccttgattatccctgctatgccctcaagtcattaccttccccgctcctttcctgtgttcccaaactttgttgatcttcatcaatccctctgatgcagatggctccgaagtttgcaccctattaggttggtgcaaaagtaattgcggattttgccattaaaagtaatggcaaaaatagcaattatttttgtaccagcctagtaaattttctccttctaccaaactttgtccctgagccatctcatcacctataactacctcctccatgcagttgattcccagatctctattattctactgaaagtccgttccccaactttctcggctaggataacagaagcccaattagaattcatgataccagtttcccaccaccaccaccaccaccaccaccaccaccaccaccaccaccaccgtcgccctgccattgttagcaaaaccatctcttgagtggagctcaaagatttgtaatctcccactccccagaaagataacttcagactcagcctagaagtaaagttcctccagatatggcctcaactaccctccaacccatgtccccagtgcattcctttgatgcccccttcagtggagttaaaatggagtgagtgtttttcttttcacatactcctggtgttcttccatgaatacaattttcacctcttgaatattttcaataattctccatgctacacacagtgaaattcaagctccccatcaggaccccagtcttcccaaatgctctttgcacttttctgtctccatgctttcccttgggtcatcctcttctctaatataaccttgtgtattactctaggttctccagagaaagagcagagagatagaggtagagctatacacatagagagagacagattgattagttgtaagggatggctcacatggttatggaggataaggagtcctggagtctgcagccagcaagctggggacccaggacagccaatgatatagttccaactcgagtccacatctaaagtcaggagaagattgatgtcccagctcaaatataatcaggtaaaaagagcaaattctctgtgactttacctttttgttttgttcaggccttcagtggattggatgaggctcacccacattggggaggacaatctgctttattcagtctaccaattaaatgttatcctcatccagaatacctcagagacacacccagaataatgtgtagccaaatatttgggcaccccacagcccagtcaaattgatacataacactaactatcaggtcttgcttctactctctccccattactgcatggccaaatccttcccttatttcaaggcttagttcaaatgttacctcttaactaagccttccctgctaaccccaaatattaatagaattggtgtctcccttctctgatgtctcaaaatacgttgtgtgtttctcttttactgtatttattacaaactcccttataaatcaagacagtgattcccagacaaattatcaaaagagtataaaagaagtcttctttgagtgtgaaatatctcatggaatatagcacatggcctcttcatgaagaatctactgggagagaagaagacaagctggaagagaccagggaaagggggttagtacaaagcacaatgaggctgggctcatacagtggctcacacctgtaatcccagcactttgggaggccaagcccaatggatcatgaggtcaggaggtcgagaccatcctggctaacacggtgaaaccccgtccctacaaaaaatacaaaaatgttagctaggcatagaggcgggcacctgtagtcccagctactcaagaggctgaggaaggagaatggtgtgaacccgtgaggcagagcttgcagtgagccgagatcgcaccactgcactcaagcctgggtgacagtgcaagactccatctcaaaaaaaaaaaaaaaaaaagaaagcacaatgaaatgtcagtggatgggtgcctataatttctaagggaaatagaatataatccaagaattttatagccagctaaattattgcccaatcaaaataggcaaaagacatgatcacatgttgaagaacttaaagaacacagtatttctgagctcttttaaaaaaagtcttcataataaaatttagtcagccaagaaattaaaaaataagcaactcgtgaattgaatgaccatgacaaaaggctaattatgagaggtgaatccatttaaaaataggactattattgcagaacagaaagagaaggtggtcaaccttaacaacataaaacaacctagaaataactagtttccagaggtaaagggagggactgtaggaagtagaagtgctgatgccctttattaagtcaattaatcaggtctaaaattgaaatgtggttttaaatatataacttcttgtttattttcctccctaactacctgaggatcaaccaccatgatgaacgacacagtaactatctggaccaggaagttcatgaccaatcgaccactccaggggaaacacatggtcaccaatgtccttcaccccggaaaggcaacaaaatgtacaagaccacaataggtgtcatcttcatattaatcgttggactcagaacccatgttggtggtggttaaacaatgagctttggcatgctatctgtttctttgaattatgcaaagaaaaatgaactcaaacatagacttgcaagacacagatggcatgagaagaagatgacctcaagaaaacagcaaaaggaatgcaagtgcagaatgaagtccagagactgcaaaggccaatgtcagtgctggcaaaaagcaaaaggagtaaagattttgtaatgactttatatgcagtgactgtacaaatttttcctgagatgatcagtcaactgtaaagacttctacatatatataaaacatcttaatatttttcatcatcttgatttcttagatgttctagaaactgatttttagtgaggaaaaactacatttatctgagttgaccagttccttcagtttcacttctatttctttttcttctgataaatttacacagcattcaatttgctatttcttgtttttaaaatctcattttgtgtgatcagaagtgtctgttcatgtctctagccatctttgtgcatagcaaggaatgctgttcacttaatattaggtggtttatttcttggggtcatgagatttggggtgatttctctccctttttgtacttttctgtattcattaatttttttgagacaatgtcaccaatgtccttcatattaatatttgggctcagaacccattttggtggtggttaaacaattgtcacccacactgcagtgcagtggtacgatctcagctcaccaaacctctgcctcccaggcttaagcgattctcctgcctcagcttcccctgtagctggcattacgggcgtgcaccactaccgcctggctaatttttatatttttagtagaggtggggtttcaccttgttggccaggctggtcttgaactcctgacctcaaatgatccacccgccttggcctcccaaagtgctaggattacaggcatgagccaccgtgcccagccttttctgtattaaatttttaaaaacgcaacatttaaaataatcgtcattctttttgaatctactttgtattataggtatccaaatactcacctattctctcttacgtgatgacaaacttgttgaaatgtcatttcattttgtggctccagccccagggattctgactctgattctaaagggtctgcatgcagagtgagcaagccacctggatgattctcttgcaggtgttttaagggcaggagtttgagacaccctgatgcaaaagaacgaatcctcaaggaagttggctgtacatgtattttccttcctagcacaggaaacgacagaaagattatccaatcagtaccactcataacacctgattatatatgtatgaggaattcagaaatggtttgatcaaggccgaagacctaaaaagaggctcttctcttggacaccaagtccccatctcatgtgtggttgaattagtagaaactgaggatgatgcttcttcctccagcattggtatcccatggtttttgttcagtagatgaagtatctccatcccccaatatccccaagctctatcccagtttcctcacatacacttttttttttttttgagacagagttacgctctgtcacccaggctggagtacagtgcagtggtgcaacctcagctcactgcaacctccacctcccaggttcaagtgattctcctgcctcagcctcctgagtagctgcgactataggcacccaccaccatgcttggctaatttttgtatttttaatagagacagggtttcaccatgtttgtcaggatggtcttgatctcttgacctcatgatccacctaccttggtttcccaaagtgctgggattacaggtgtgagccaccacgcctagcctgagactttcaagtaaagccacaatggaccacagagcttagacatcagggctaacatggaatctctgtcattaaatcttgagatcttattatctttgctcaaagaaaaaaataatcacaattgacattttgaggagaagacatctgaatgtaaacttgatcttagaggatattaaggaattactggtaatttgattaggaatgataatgatcatataaaaaatgccctcatgtttttagagggaaagtaaattacgtaggggtgaatatcaggatgcaattacataactactgtaaactattttttaaatacttcagaaaaacaaatggagtaaatattgcaaacgttaatagtttttaaacctatgtgatgggcatatgatagctcattaaactagtctctctacttttatgtatattgaaaatttttcataataataacaaaaaaaaaaaccttggccaggcacagcagctcatgcctgtaattccggcattttgggaggccgaggtggatggaggactgcttgagcccaggagtttgagaccagcctaggcaacatggtgaatcctcatctctacaaaaaatagacaaattagtcaggcacggtggtgtgcacctgcagtcccagctactcaggaggctgaggtgggaggatcacctgagcccagaaggtcaaggctgcagtgagccaagatcatgccactgcactccagtctgggcgacagaccctgtctcaaacaaacaaacaagcaaatcaaaaccctcttggtcccatttcccaaaaaaatgattttttcgagatcttaccatctcctggcttggtgcagagtacaggaaatcaagacaaagtacagcacacaaggattaaggagggagggaagtgtgggggaggctgacactgtggactctcccagctcagttgacccatgcaccttgcttcatggaagaaaggaatggaagatgaatcgtgcctttcacacacagtgaccttcctcactagtaaatgtgcctccagaagtgtccaagaactcagcgccacagccaggctggctgcatgagaatcacctgcgagcttttgcaaacataggcccctactgggtccaaaggtattcatctcttggagaggaggagagaggcagaacaaggaaaaggatgggaagaaaccagccttgtgcacaggaggatgctgggattcctcctgcacgtttagcgcaatgcagcctattttacaaggtcacagaagctcagagaggtaaacctgcccaggttctcatagtttgtaactggcaaaacctgcccaaatctctgtctctagagatatttccacttgcttcaactctggagctgtctaagttgtaaagacaacagattccactcatcactcacttttgtttgcagatattgcctaaggtcccttgtgaatatttaggttagggctgtttttttgagttttttgtttgtttgtttctttttttttttttacaaagcaatcttgtggaaagaacccaaagtggctcccccatttaagaccctgtaaacagggagacgagagtctggagtcatggtctggtttccaaaccttccttagatttccctgtgtgtaaaatccaacaacaatctttgacaaattgcctcccctaggggagagatggaggaagtgttaactttgcttttttttttttttttttttttttctgttttcagacagagcctcgctctgtcgcccaggctggagtgcagtggtgccatctcggctcactgcaacctctgcctcctgagctcaaatgattcttgtgcctcagcctcctgagtagctgggactacaggcagatgccaccacacctggctaatttttgtatttttagtagagatggggtttcacatattggccaggctggtatcgaactcctggcctcaagtgatccacccccctcagcctctcaaagtgctaggattacagtcatgagccaccatgcccagccactttgatatttttttttaatagacagcttcgaggtccagtatgatttcacagattaggaaacatcacaggcaaagaagaatactttgcattcaaatagcagaatgttttcattttcaaagagctctcacctgccatctaatcttgtcttcctagcagtcctgggagagaagcagatgtggtttccaatcccactttccagaagaggagactgaggcagaggctttgcagatacacagaggacatgtgaggacaggtgaaggtcatgaacattgtcagccccctcccccaactggacattcccagatctggtggacttccagccagaggagacagaaggactggatcatttaactctgccatgggtgccaggacccaatttttccctggctaactcggtcacctcctgtctgggatctccaactactacacatcccacaagtctcagctaaaacagcaattcaacggggaacttttttctgaggctccaggattgggccaggccctcctcatggctctctgcccttcccctactgcagaacttagcacctgtatgtcactattggttcaaacatgtgcctttcgtatgctctccacgttatctgcagcatctgccaagaataataatgaatggtaaaacctaatctctattgagtgtcgatgatgcacttttaacgtgacatcttatttaaccctcactatatctgcaagagtagaagctattaatagccaattttcagataagaaaatcaaagcacagtttctataacttacccaagcagctagctaggaggcagctcaatttgagctcagggaatcagattccagaaaccatgttctcaattactacagcagatacctccccagaatctagtaggtggttaatgagtctttgtggaataaatgaacagaaggacaagcagtggatggatacataggtgggtgggtggatagatgggtggatggaaagataggtgggtgggcaggtggatgaatgaatgggtggttgagttggtgaagggatggctgagtgggtggagaaatggatgagtggttgagggggtggagggatagataaatgggtggacgggtgggtggatagatgggtagatgagtgaatgggtggatagatgcatggatgagtggatggatagatgggttggtgggtgggtaggtggatgatagctgggtgcataagagagtgcattggatgtatagatgggtgggtgggcgggtggataggtgggtaggtgggtggatggatgtatgcatgtctggatggatggatggatggatggatggatggatggaaggaatgatggatggatggacggacagatgaacagatggacttgagcatttattcagggtcctctaaagaattgagtgatttcctagggtgtgtcatcacctgcatgtgggtgggcaagggggcttgcctctgtaatactcatgattatgggtagtgctcagccttagtcaccactctcagaacactttattgactaggaaagtcaaaactggcattggcaactaatgcaaattacagctataactaacagaagatgttgagtgatgacagctgggcaaccaataatcaataacttggctgtgtcatgttgctgccatgctggacaggtagagccatgggttccctaatccctccatcacattgaggatgcttatcaagacttccccaaccatggggacaaggatcttatcaaatacttgcagttcaccccaaaaggctcaccctcttcgttccacctgcacatgaccttcagctcaaagacatttccagtcatccaggtcagcccttcttccagcctttgaattaaccctgatgactgcctgcccattaggtatctcacctttcatcacacagccttttccaaggctttccttcagtccagccctcactaaacgctgaaactcttgttgacaaaatccagaacaagctggctgggggatacaggtgggaagcaggctgtagtaatgggaaaaattctaagcaatctcgaacacagaaaagaaactgaacaggtaagagagaggcagtcaagagaagaagtgtgaattttgcataactgaagctgaagaagatcagggggcatggcagaccacaagataaatatgatatagactcctttttaaaaaagtataaacacccaccctttcctactgacaactgtgcttcaaatattgctaaggtctttactaaaggcgactcagaaaaacagggtattttatgcaatacagtaagaaggcccataggcaagcatgttcctgacaccaccttctaggataacccctgggattctggttacgcctgtcctaaagttgcctctcactcctgctgttggagaactaccatgagagaagaaccatagtgaagtggttaagagtgtgcacccagtgaccagccagatggcttcaaaccatcaccatctaatactgagcaagttacataatgttcctgagcctcaactttctcatctgtaaaatgggtatgtcgtcattcattaatcaaattctaggtaagcatatactaaacaccagagacacaaatgagaatcaggaacaggcatggccctggtcctcacggtgaccacagtcttgaaggggaaggatgacatgcacagaaataggaagccgtagctgagctcatgacacctggtgtcatgaaagcagacaagagggggttgctgtgactgagtcagtgtggccaggcgtccctgaggatgtagtgactccactgtcagatgagactatgaccaggtgaacaggtaaggagagggaaaatctttccaggcagaaagagcaggatgtgcaaaggccccgtggcaggaaaagagcaaaggaagtgcaagagcctgaaagaggccagggagaacaagtgaacatgtggataatcacagcacccacctcatacaggagttgcaagaaattgagacactgtctgtaacagattcagcaatgactaaatagaaactatctcctaaaagcacaggatgaagctccttggtggtatttcccatgtgaggctgccatggactcagaggccaagttcaacctgcctgtagacaacctccaagccagctggacacacatacaccctcaggctcaggatacccaggacagagtcctggatgcttgaagtcatgataagtatccagaatgacacagaattccagccaggcatggtggcttacacctgtaatcccagcactttgggaggccgaggtggatcacctgaggtcaggagtttgagaccagcctggccaacatggtgaaactccctctctactaaaaatacaaaaaaattagccgggtatggttgtgggtacctgtagtcccagctactcaggaggctgaggcaggagaatcgcttgaacctgggaggcagagactgcagtgaaccgagattgcaccactgcactccagcctgggcagcaaaagtgaaactccgtctcaaaaaagaaagaaagaaaaaaagaatgacacagaatttgctaaagggggagaaaaggctttcttccaaagctgggcctggtttctacagagagtctttcagatgaaaattaagcagctctttgcaagcagctctttgcaagcacctcagaggagaacccctcaccctgatgaatcaggcacacaggcggatccaagacaattggctgcgcgcatgtgaacaagcctatggtggaaatgcagtgctttgtttggggtggtttaatcaccaggagggagaagcttctaaagcagcattcagaggtggctgttgcctgggttttctggaagggggaggcggtgaggatgagggcttccatttcatctgcaggccccttgcagaaggagctggggaaagctttgcagccatctgcacactgtttgccatcttgtctggctgggcagccgagctccagatgggggcggatgggatagctcttgccaccgtatttggagagagatggcagggaagtcagcccccgtgaagaagacaggagcacacaggtgctaggcagtgctgcctaggcccctgggctgaagtgtccaaccccacagcctctaggtgtcactaaagcagcccgagaggatcttctctgtccatctccatcctggcacctacagacacttggagagagtccttcacatgggaactcacaaatgcacactgataacccccacatggaactgtcatatgtagcaagtgaaaagacaggatgccagttaaacttgaatttcagataaacaacatatcattttttagggtaagcaggtcccaaatattgcatgggatatatttgcaccaaaaaaaaaaatggttaatgagaaattcaggtttaattggacttcctgcattttacctggcgagcctaaccttgcataaacacaaccccaagcttgaaactcacagagaagccacggccatgatcacacacgtgcacaaacccatatgccttacagagtcaagggctgtgatgaatgtccccacccttgcacacttccctgtcctctgtctgggctcagagtaaacagagggtcacctggcatccacgtctaagctgggcttggaggtgtcctaatgaagcaggatgctgacctgcacttccccagctcagtcggggctgcagccaggcctagcttccagtctcgggcctagaacacacagcacagccccagaccttggcaagaaggcttgatctcaagggccactggtccaggacctattagaagccccacttctttcctgtgtttctgctgccattgccccagtctctgaccctgacactcaatcactctataaacacagcaggtactaggggtggctctgggctctgcactaaagacaatgcccctggtaaagccacagtctagcaatgacagtcaaccacgtatcagcaacggccctgccccacacgtgctgactgcgcacaaggccggcgctgtgaacgtgctctcaacagtgatctcactgaaccctcatggcagctctaggatgcagacagtagcatcacattatccccattttacttttgaggaaactgaggcctgaagaaggcaaatgcaggcctcgagatttgcagtaacattgccaggactgtttgagaaagcaaacttctccagagtgaggcagtctgccagagctcagaagccagagtccctgttagcaggggctggggggactgtggggtgggggcagacaagcaggtaggggctggacaccccaggacaccagggtgcagactggtgtgagtaaaagaaagagaggcggtcgtgccatcatctgcagaagatgatgtctacagaggacagtaccatgtgagcccttggggagccggatgactggatggaattttgcacaggatgcaaattaagcacagatccccctctgacctagacagcccacctccaggaacatctcacagaaatgcacgcacagagcaccaagtgatgtgtgcgaggaaattcatcagaacaccgtctgtgattgggaaagggcggaaaccatccaaagacgtatcggtgcagggctggttaaacgaagcgtggtgcatccacacgtcagaataactgctgggagaagaaggtggtacccaggttccaacgtgagacaatgtcaaagacatgctgcctgaaaagcaggctttccaaagaataaatatagcattattccatttttttttaaaggttacaataaacacttatgtgcaaatacatgtgcttgcgtgcagagagggaaaaggtgtggacaggaacagaaaaccaaactctgcgtggtctcactcataagtgggagttgaacaatgagaacacatggacacagggaggggaatatcacacaccagggcccatcgggggtgggggacaaggggagggagagtgttaggacaaatacctaatgcatgcggggcttaaaacctagatgacgggttgataggtgcagtaaacctctatggcacatgtatacctatgtaacaaacctgcacgttcagcacatgtatctcagaacatagaataaaaaataaaaagaaaccaaagaaaaaggtgtggagaggtataccccaacccttcccagtgttacctctgagaagcaagatcaagaaaatcaaatcaagaggaagttttatgttttgttttctctataaattttttatttttttttattttttttattttttttggaaacatagtctcgctttattgcacaggctggagtccagggacacattctcagctcactgcaacctcctcctcactgcaacctcctcctcagtgcaacctcctcctcactgcaacctgctccttctgggttcaagtgattctcttggctcagcctcccaaataactaggattgcaggcacgcaccaccaagcctggctaacttttgtattttttgtagagacagggtttcactattttggccacctggtctcgaaatcctggcctgcctaccttggcctccaaaagtgctgggattacaggtgtgagccaccacacctggcctgcattgcttgaattctcagaccacatggaccctctcatctggcccaattgcaagagtccaaggcaggaaaggcagaaggcaggggcttacccctccatcaggacaacatagaacagagtcaaaaaagaaaaacatgaatggatcagtcaagagggctgtgcatgtgccctcccaggcacctacaccttgcaacttaagccgacaggctttcaagccacagagtcttcctccccagagactagcaaggacacaagccctggccaggcccctccaggaggatggtctgagggacaaggtggggagcagagtcaggggtggcgggaggaaagggggacacgaagccaaggaaaccagggcaacccatgcttcctgaaggccaccaggacagggcgctacacagagcccctgtgtacctgtttctacaacagcctgaacacaaggaaaaggaaaacaaggaaaatacacaaagccccgcctcacctggagcaggttaaataaaggtgtgtgactttgtcttcatgtcctttggaattggaaatccaagcttcctctcctgtgcctttaaggccctggctgctgccccacagccccctctcttccctcctcctcctgtcctctttttttttttttttttttgagatggaatatggctctgttgcccaggctggagtacagtggcacaatctcagctcactgcaaccaccaccttccgggttcaagcaattctcgtggctcagcttcccgagtagctgggattataagtgtcaccacgtctggctaattattgtattttttgtagagacaggttttcaccatgttggccagtctggtctcaaactcctggcctcaggtgatccgcccacctcggcctcccaaagtgctgggattacaggtgtgagccaccatgcccggccctcttgttctaactgtgccatctctttgcagtctcccccgagcagcttttcctgggcctgcccttccaccctccagatctgcactctcaaaccaccccccaatgccccctggccctggctcctgccccggggctctgatcctcagctggtgaggtctagagggtcacagggagccagactccctagagaagctaaggcaggagccccgtgcttaggcaggagctaagctaaggcgggagccctgtgggtaacctgcccccttccagctggggctgaatagaagggggaaaagctgccccccagaatacagggctctcagaggccctggggatctgtgctggcagtcaggaggactgtcacctcagcgcacttgcctgcaaggagggctgtgcaggaagctgcatgttgctcagagaacaaaaaaaggaaattaaatgcaccatctggttattaggatgagcttttgaggcagacactgaaatatgcatgcctagacattataaaacttgggggaaatgttaatttcaataacgccagttcttgtactcgccgaaactattcttttatctctcttcctagtaatctgggggctccatccctcagagtggcagcgccaagacagctggcctcactgggttttgtaagctgtgcaaggtgagatcccaagcccttgcctggagacccatcttaggaaaatgttagaacagggcaacaagttgccatttcctccctcctttctcttccccatacaaaaatcagaaagcacgctagcccagacttgtgtacatttcaagggtggctggactcatggccgcctgggacgtcagggtggtacaaagtcctcttaacctaagactgtcggggtacaaggatcagcaaattttttttcctttttcttgagggccagatggtaaatagctcagctttgcaggccataggtctctgtcccaactattcaactctccattgtagcaggaaagcagccacaagacaatatgcactgaaatgggtgtggctgtgttccaataaaactttatttgtatgaacaggcagggggctggttctggcctgtgggctacagcctgcctcctctgctacagcgtgatctccaaggacccatccatctcgtagaccagcagctggcacacaggagctgctcagatacttgaaggaggaatggagaaggcaagcagcccccagtgcgcagacgtgagggtctcccagcagcaccatcctttgccatctcatgcggagggacaaagccagagcaggtctctccaccaaggctgggttctcctccaaggaaatgtgataacaggacagaaagcatcgtgggaggataggggctttggagtcccacaaaccacagtttgcaagaccaggagcaacctgcacttccctgcacacaccctgggtgggtgctggagcatctagacttagagtgaatcttttgtccctcctcccccaactggcctccattacacttccagcaacaatgtggtgtatgtacatgatggaatactattcagccttcaaaaagaaggaaatgctgccatttgagacaacatagatgagcctggaggatattatgttaagtgacataagccaagcacagaacgacatataccacatgatctcacttatatgtggaatctaaaaaagttaaactcagccaggcatggtggctcatgcctgtaatcccagcattttgggaggctgaggctggcagattgcttgagcccaggagttcgagaccagcctgtataacatagcaagaccccaactctacaaaaaaatacaaaaattagtggagcgtggtggtgcatgcctgtacttccagatactcaggagtccgagttgggaggattgattgagcttgggaggtcaaggctgcggtaagccaagatcacaaccctgcactacagcctgggcaatagaatgagattgtctcaaaaaaaaagaaagaagaagaaaagaaaaaagttgaattcacagaagcagagtagaatgatggttgccagggtggggaagtgggcagatgccaaaggacacagaatgtcatttttagagaagaagaataagttcaggatatccatgggacaacatggtacctatagttaataacgacatatcatacacttggaaatcactaagagagcagatttttaaatgttctcaccacaaaaaaataagtctgggaggtgatatgttatttagcttgatttagccatttcataatgtatacatacttcaatcacatcatgttgtataccctcttgtacgtaatttttgtcaattcaacaactccaaaaaacaagacattctctttacaaaaataattattaaaaataaaattcagaattctattttatttatttatttatttttgaaacagagtctcgctctgtcacccaggccggctgaagtgcagtggtgcgatctcggctgactgcaacctctgtctcccaggttcaaacgattctcctgcctcagtctcccaagtagctgggattacaggtgtgtgcaatcacacctggctaatttctgtatttttggtagagacagttttgccatgttggccaggctggtctcgaactcctgaccttaggtgatccaccagcctcggcctcccaaagtgctgggattacaggtgtgagccactgcacctggacagaatataaaagattctttaattcaactaaaacattaaaacatagattatttctataagtggtaattgttctaacatgttttggtcaaaatagtctccttacccatccacaattaaatggttaattgacatttgattggatattgataaagttttcaaatcatgattgacttttccaatgtacagtaaaatgtgcgtgaaaatatttcataaaaattaatatttaaaaatggtcaggcacggtggcttatgcctataatcccgcactttggaggccaaggtgggccgatcacttgaggtcaggagtttgagaccagcctggccaaacctcatctctactaaaagtacaaaaattagtcaggtatggtggcatgtacctgcattcccagctacttgggaggctgaggcaggagaatcccttgaacctgggaggtgggttccccaggcttagagcaaaacccccatcttgtctgtctccactctcatcccaggcaatcacagtcatttccacagcctcaaccactgtctacctgggatgcctcccaagcctgagtctccagcccaaacctgccttcctagccccagacccatcagtcctggcacacattgccccctgggtcccaagcaacctcagccagtgagtccaacgtcaacttcctgtccttgcctgacactgccagccctgagatcagacttgaccattcacctccagtacctgataggtccatcagtgctttggaacatatctcacaaacattccccaaaccaggcaccagactccacacatcaacaccgtcatgtgagtcaccagcatccctggcagggacccctgtcccagcctccaactcatctccttcctgtcccttgagttctgtgtcacattccagaggccacaagaagaaaaatgaccaccttaatgaaattaaaagaattgagaagacatttccctatggtccaaagtctttccaactgagaaacacatatcaagatccagcctgccagccctgcggttaaatgttcctgaaataattaaagcccagggtgacacagcccccactccacaagtactcccagcacaataagacttgcttctctgcaggggcttgaaatgtccagtgtgtaccttgcccctctctgtcatagctaacaggaatgtgctccgtgtcttcttcctgctcaaaggactgtccaccaacctgcgcaggcagcactttcggccgggagggacgagaggacttcccaccatttcccacttacgcactgcattcctcaggagcctgcctcacaaattacaagagcgccacagcagacacaccacattccagcgggtggccatgtcttcatgtcagcttgaaagatcatcaccagggaaatatctatatctcagcagagagagcttcagcctgtgtagtccagctgtgctcaaatggaaatccagaaacccagatgttggtccaaacaccctgtcttggagagccggctctgcaggtccccagcgtgggagtgaactgggtgggccacctgccctgcctgcccacatccctgcctcctggaatcctggaccctgagaaccagagggatgtggtggggaacaggcaagtcttgtgcagaaagccaagatgccacccaaatccactctgcagtctaggtgggtgatattctggtctgcaccgtaccagcgcatgaggggatggaggatggagtctagacaagccaaatgtaaaaagatattgcccaagtattttgtgctttgtctgtgttacaatgctatgcccagcccagcgtggtggctcacacctgtgatctcagcacattgggaggccgaggcaggcggatcaccttaggtcaggagtttgagaccagcctggccaatgtggtgaaaccccatctctactaaaaatacaaaaattagccaggtgtggtggtgggcacctgtaatcccacctactcgggaggctgaggcaggagaatcacttgagcccaggaggtggaggttgcagtgagcagagatcatgccactgcactccagcctgggcaacagagtaagactctgtcttaaaaaaaataaaataaataaattctatgcccagcattttccatgtactgtcttattatctcagtaaatcccatataaccttcctatgaaagtgtatctcatttatctccattttatagatgagaaaactgaggcccctggagtagtattaattttccaagaccgcattgctcataaagggtacagcagggacccaagcttgacactctcaccctcaaacatttccacaagtgtagaccaatggctgtcaactggggtggttttgctcaagtactactcccttgctccatgatatttgaaaccgtctggagacatctagggtagccatagctgggagggtagaatggtacctagaggatggaggccacagatgctactaaccatcctacaatacacaggacggccccacgaccagcaccacgaatggtctaaccccaagtgttgtgactgtgccaaagctgagaaacccaggtttctcctcagcaagaaggaaaatccctgcaacacggatgcacctctacaggagccccaggctgacaataaccttcctcatctggtttcaaccctggatgctttcacctggtgcgtccatcagggatttcagggactccaatgagttattacccttgaatgcttggttccgcctgacaaccctgaaatctctgctgaggtgcctggtcttgaggaaggctcagcaagtggttgagggtgataaccaaatacctaggagagacttttctctccctccaggaagagctgttggtcagacacaccctgggatcattcacaagcggtcaataaaggcttggggagggccaggttttctaggccttctcaatggggtgggtgtttatggatacacaagaagcctgagaaacttctgatattggcaggaaatcaatgccccccaccctccacccccccacctccccaccataaacacatgccctgcagcaggacttggcactcaggggctcctggggtcccgatttacctgctaaaacatcctctagccaccaccgaataaagcaaccccttgccacccaaccgcgagatctcagcctgggagccactccaagggacatccagtcacattaaaacctcagccatccagagcaccaggcctggtgatgagaaagaacattttatccttaaaagcatctgaatgcccatgctgcttcttgcaaagtccaaaataatctgctattaaagaacgaggatggtttttaccaagctaatggtctacgcagacaaaatctcataaaagggcactctgttcttcttgatccactcagacatggcctgtgagtgaagaaatggactctcctcctcaaataaatcactgctgattctcacaccagcctgacactgcctcatgggttcttcaaagagagtattcccatagaaactaaaagggaagaggaatgggtctggcgggcattgtgggcagcagtgggctttgggccaaattttaagtttgaaaatcaagattccctcttttcaaggggccaccagactgagcagatacagacaccgtgaaaagagggtgccatgttcagattcaggaaacaaggatggtttctgttcagttcctccatcatccttcaggtcatgcgattcccatttccctccgtggaccaaacaattcagtggggtttctgccttttaaatatttcattatcaacatatcatcattttagcctccagaaagcattttaacatggagattctggcttaagactcttgtgggtctgtctgtctctctctcttttccttgaaacggtctcactttgtcaactaggctggagtgcagtggcatgatcacagctcactgcagccggaccttccagactctagcaatcctcccacctcagcctcccaagtacttgggactacaggcacacaccaccataactggctttttttttttttggtagatatgaggcttcaccatgttgcccagctggtcttaaactcctgggctcaagcaatcctcccctttcagcctctcaaagtgctgggattattggcttgagccaccacgcccagccaagaaccttgtctcttgtgatgcaccccagaacaaaacatcactgcaaaaacacaccaaggcatgagttttagtcctaagtcccatttatccaccatacactatgtgccaggcacaacgctaagtgcttctatggacgagcttcccttaatctcagcagtaacaaccccaggcaacgaggcctgttgacagatccatttgccactgaagacagtaaggctcagagagggtaagtggcttgtgccatgtcagccagctaaggaggggcagaaccaggatgcaaaccccagccgcctggctccagactcaggttcccaaggtcccactacacttggtcactccactgcattctggtatcctggtctttggcagagtccacgtaaaagaaggaggtagagggagtgagagggacttcatgcaataaagtttcccggcgttacactgccatcgtaattgtgtccccgaccaggacctctcccttctcatcctttccgtgatcggccctggaaaaccttccagagaactgtcctccttctcccaggatctcagagaaaattcgcctgagttcagtgtccaggtgacccaagctctgaatgcggtaacgtgcacggggagataaggatgtcaccatgagcaagcctcccagacggcatccaggagcaaccccaagactgggcaggggggctctgatgccgcccacggcgaggagggctgcccgtgctgcctaaatgggttccgaatgaaggccgccctctcgcccatgtggggctcattaaccacgaatccaattattaagacaagctcagctgagcaaatggtcaaacataaaaacatgtggaaagaacaaagaggtcaaccccattatccatcaaaaaccatcaaggtggcggccctcactgaggggtacagctctccagtgggccctcatctgccctccaaacccatgtgcctcctcagtggaaggccagcaaagccacacaggaagagttggtgtaggaaagcagaaagtgaactccaggaggccaggctggccacggagccccatcccacacacacaggcccggtaactcaggggctcacgtgtgcaggacaccgggagctcacagggacagcgtcccgggggatgcaaggaactttccctctctgtccctctctgtagggatggaaagaggagagcgatttctgggatgtaagccatctgcctcctctcaactctcgctgcccaaccagaaagggaagaaaaacaggaagatgcggggcaggtgaggagctgggtgagcaccgccagcccgcagcccagcagagcagggcttggccaagcctggcgccagggacttcccccctacccccgccacaagcccctcgccaggtgagaggcactgacagagtcccagacagatgccccagacaggacgctcagcgcaacccccgccccttcccctgctaggggcccccaggacgcggggctccccctccccttttggctagccgcagagtccagcgggtctctagtccagggacgtcgtgggagaatcaggaagtcgaagccacacagccgagaaggggcagctggcgtctcggaggccgtcgcgagctgtcactccgcgcccgccggagttgtcgctcagttaccaacttcaacccggggccggccacggagcctcccgccgcccctaccccgcgtccccggcacccccggcacccccggacccccgcgcccgcgtcacttactcctctgccgtcgccacctgtctgggtgccggtctccttcctgcctggccgcggtgcgtcctccccgtcatcgggctgtgcgcttccctcctccagcaacagccgcagcctcttctcttcgggagtgacgtcgtcctcctctctcctgggccggccatccctgcctcggggcttgccagtggctttggagctgccggaagggctggccatggctccgggggctctgcctgcacctggggaagaggaaggacccggcgcgagcggcctgtcggcggagctggggcgtctgagcgcgggctcggtgggtccgcgcggcgcggagctaggcatcggggcgggcgtgggctcctccgcgggccgctcgttgctctctggcgccctctgctggccgctcgcgcccaccgcggacacgccgggccctggcctgcgctgagctcgcctgccctggcccaagcagtcgctgtcccctgcctgcggccatgcccgctctggccaggccctgcacctcctccccgccccaaccaggttgcaccccgatggtctccctgcccaaggaggagagaagggacgccccgagagggtggacatcagccacagccaccttgtctttgctcttaccctgtgtcttgcatgatttggaggtggtgggaaaaccgaggctgctcaaaattcgtggagaattccgcctgcaggatgacatgaatgcaccttcgcgttgcctaccaacagatcttttttgagcatctctgtggaccaggcgtggtgatgggggaggggatattgtggtgaacatgacaggcatggccttcacacagtagggctcagccctgggtgagaaggcattgagaatggacattgtcaattgggcaaaaggaggccaagaagaagtgctgggggcatgggaactgaaaaagacaggaggctcagcatgtcttggcgctgggagattgacagcaacagcggctgttccaaaggaagcaacagctgagagacgtctcagagagttgttctcagcccagtggaggttgttcaggcagagggaacagcgtgtgcaaaagcccagaggctgggaaagaagcagaaagaggactgtggggctggagcgtggtgggcaagaggagaaaggtgtggtgggcagacagattgcctgggacccagccgtgcaggggcagaggagataggggatccttgcaggcccctagccggggctgaggcacagagacaatgcaggtgggcaaagggaggagacgtggagaaatattctggaggcacgccctgatgaatgagcccaggatgcactcttagtgtcagtgtggagctccttccttggctgtgtgatgagctgaactcgggggtattttctggacattgaggtgctacaccaagagtccaggacaggctgagcaccagcagctcctggcccacctcaaaagcaggagagacaggggagactggggatgctggggtggaaggggaagccaggaaggcaggagaggccagggaagcagaggaggccagggaggcagtggaggcaggagaggctggggaggctgtgtcctttccatgattctgcccaggatcctaggcccctgaactccctgagcttctccaccccaagcactggaaccatgttgcacaatggtctctccactaagctcctgatggcggaccctaccctgctgtgctccctatttcaaccctaacagctctcacagtgggcagcacatagtaggtgctcaggaaacactggtgggagagcacatgggtctgctcagcaccttcctctctcctccagctctcccctgtcatgaaataattctgataacgacacatgggctttggactctcttctattactttcaatatgctaatccatctatacctcacagcagccctgggggtgggtgctattaggatgcccattttacagaggaggagactgaggtataaagagggtaagtgacataggcacactacaggggccggggccaagtgattgcagcactcaatccccaaaggcaaggtggacgcagttaccataaaagacagcagagtcaaagctgcaaccagaacagcctgactcacagagacctatggtgccagctgatcgtggcattcctagaagtgaaataggtaagaagcctgccacatttttacttgatctgtgtttgcagaagagttctaggtcaggtgagtagaagtctaatctgaatcataacaacagagtcacagtccccagtcaattcccagacataagccagttcacagacccggagtcccttgtctgaatgggaagccaggtcccctccagaaaggactctgctccactgccaaaaatttatactgtcaatttttctcccagcctgcccccaaaggaatacacagccttttaccaggatgactgaacaggggaaaaggaactaatgagatctgtgcaggatcactggacacaggctctgaactggcactagggcgagactagggtctaccagtcagaataggcattttggaggtcaggtgaatgttggtgcaagttcatgtcatggtaaatccattgggtccccaaatccatcctctggttatatacaaagtggccttgctgagattcaaattcagggcatccaacagagaggctgtgctcttactcatgaaacattctgacactagtaaccaatttaaaaatgcaaacaccttctggggctagccagagtcctccaaacagtcatgtaaattggttctgtcaaggatttcctcctaccacctgctgagagccagttgcaaggagagactagggaagggcattgggtaactttgttgctaaaactcttttggataaagacttttgggaaaagaagcaaatagagttcagcagaagaggtaagaaagtaagtttatgtttggccaggcacggtggctcacacctgtaatcccaggactttgggaggccgaggtgggcagatcacgaggtcaagagatcggaccatcctggtcaacatggtgaagccccatatctgctaaaaattcaaaaattagctggccatgatggcacatgcctgtagtcccagctactcgggagcctgaggcaagagaatcacttgaacccaggaggcagaggttgcagtggaccgagatcatgccagtgcattccaacccggcgacagaacaagactccatctcataaaacaaaccaaaacaaacaaacaaacaaaaaagcaagcttatttttaagcctgaacaaatgtagtggtttaggggttctgcaaatacggccccaatcaggctacaagatgttgtggcagcaacacttacacccagtcactcctggctggctgagccacttttcaaaacacccttgcacagctgtgcagagcggctggctccactggcagccggcagagacataactcacactgtcaccactcccctcaaacccttttagtaagcactttttttttttgagacggagtcttgctctgtcatcaaggctggagtgcagtggcgcaatctcggctcactgcaagctctgcctcccaggttcatgccgttctcctgcctcagcctcccaagtagctgggactacaggcacccgccaccatgccaggctaattttttgtatttttagtagagacggggtttcaccgtgttagccatgatggcctcaatttcctgacctcgtgatccacccgcctcggcctcccaaagtgctgggattacaggcttgagccaccgcccccggcctggtaagcacttttaatcaatgcaacaggaataaacatttgctgcagagcggcaatgtgcagggaggaacattgttccactcaggctcagaaagcaaaacctcctggctgtttgcatctatgcaagagctcgcaggaaaaaccatctgtgtggctgccagcctcacacactacccccaaggggtgagtttctctttccatgttaatctatgccctgatgtgccatctgtcaaccaccacaccattctcagttgacatttcaaagcatctttgccctgtgaatggtcaccagccctgccctgcaagcccccaggtgacattgaacttaaatgagagagaaaacaggtttcggggtggatttcagttcagcatcttggagtctctgtgtggacatgaaatctgtctccccagccgtgggctgcatccttgtttgtcatctggttggttgttggggacttggaaactcgtgggcacctttgcaatttgtcaagaagctgcacggcccttccaacaaaagcaagcaataggaacagaagcccaagtcttcagatcaaggtgcgacttaaagctgcctcagtgtaaaaggaaacaggagtcagagggatgcctaaggcagagtctagtccccagggcagctataaggcaaagagaaagagagagagatagacagagacagagacagagacagaaagacagagagagatgggaggagacatgaggcacccaggcctctgcatcaaaatccctacaagaggggcttcctaaaaatgcaggaggctgaggtgggcgcacacagaagttcaagactagcctgagcaacatagaaagaccctgtctttacaaaaaaatacaaaaatcagccaggtgtggtggtgcatgcctgtggtcccagctacctaggaggctgaggtgggaggatggcttgagcccaggaggtagaggctgcaatgaaccgagatagcaccactgcactccagcctgggcaatagagtgagacttcatctcaaaaaaattttaaaaatttttaaaaaaggatcactatggctacttgaatggatgataagaaggtaagagcagaagcaaggagaccagcagtgagattctgcaggcgggagtccacagtggctcagaccaggctggcgctgaagaccctctggattctgtatatattttgatgatgaagcaactcactgactcttgaagagtgggctctaggagactgtatttttaacaagctctcagaggattctaatgcaggctgaagttgaagaactcctgatttaggtgaagcttctgtttcatcctaggggaagtacctactgaattttctccaagccacctcaaaagaggtgctagacaagatgtgctccaatgtctgaacatgtgtgcacagctctagagccgacctcaggacaccgagtcaaaggttaggagtacaacagtgaacaaccaacatcctcttttcaatgagctttgcatttaatgagagaaataaaaagcaaaaaaagaaatcattttcaactcacaatggtaggagttatggtgacagtatgcctggggcaatgggagcacaaagaaggggcacccaatcggccaggtgcagttgttcatgcctgtaatcccagcactttgggaggccaaggtgggtggatcacttgaggtcaggagttcgaaaacagcctggccaacatggtgaaatcctgtctttactaaaaatacaaaaaaattagccgggtgtggtggtgggcacctgtaattccagatactcagaaggctgaggtgggagaattgcttgaacccgggaggcagagattgcagtgagccaagatcgtgccactgcactccaggctggatggccagagcgagactccatcaaaaaaaaaaaaagccaggagatggttgggcatgcaatttctatcaggtggtcggaagtccttctccaccacaggactcctcagttgaagactagaaaatggtaggaattagccaggttgataggagaggtggggaagatcattcccagcagagggaagagcatgtgcaaaaatcgagacgtgagagggtgagaagctgagagatgttcatataattgtaaaaagtgactaatatagaggtaagttggagccaaatcttaaaggctctttgtcaggtttatcctgtagacaaaaggagacagtagatgtttttaggcaggggagtaatgatccactttgtgctataaaaagagcagtctggctggaggagagtgggaggtgagtagaccaggtaggaggttgcaatacaccaagtgagacaagatggttggctggaccaaggctgtggcagtgaggatggagaggagacagtagactaacttgactgagaaagagggaggaatgaaggatgaggcccaggtgttttggaagctgggtggatggtggtgtgaatctgacggggtgagcccaggcagaagaggaaatcaggagaggaaaggtaagatgaggtcaatgcaagacagacagccaagtggagataacaactgggcagttggattcatcagcctggagttatacagagagctctggaatggaaataaagaggaaaggactttgggaataggtgaatcctcccagaataatgtgtagagaaaggagaatagaacacaggggacagaaaaagggaagagatttgttattaaaaccaaccatccatcagatatcttccgatacaacacttgttggaggtttcctcagtgtgagttattcaggaccagagctaaagaccatattcccaataaaatcactgctgggaaggtcttcatgaaaacatttaatgctgcttttaaaacaacaacaacaacaaaaaggctttagctactgcacagaccctggagcaatttttcggcaagagtctatcaaacacgaatctgatctgactcaaggaggtgtcatatcaagtgtaaaaatccaattccaatgtccataagagcctttctgccaggtacaagaccctaatccagttgagtgattttctattgattaataggctgggaatacgcaggttgttggtttttgagatttccctccctgtgccttcatgccagctgtgaaagagtcaaaaggctcctaactgtcaaaataaaaatgacacttggtcacagaggaaacagggtataggtcaatcacattgatgactttttaactatgagaagccattaatgttactgaataagcaaatctgtttgcataaccagatttttataggctactgggaataaaggttttcctaagtgggtgatttgtacaacgatagcctttgggtctctgatggaacagctctgatgaggaaatgttcctttaattatgcggaaggccaattaccacattatagccacattgttttgcagattgcatataatttcaccatttccatagcttcagcactataattctggagaaaattcaggcaccaagaagacacttgaggcacattatgctggagacaaagatgttttaacaaattcaatttaagcttcaacattaaagttattttgttgaataaaacataatgcaataatgagcttgtgtatgtcaactctatagtggaggtaataatagctagagagagcatgtcccatctcctctttttaatgctcattcgagtaatacataattctatagagagaacctttctctaatatgtgcttcatctcaggttaagcgtgttttgtgcaactgtgcttcatgaaaaaaaaaaaggtaagggatctaatttgggagccattcacaaaagtgctaccacttgatgctattttatactctgagatttcttattcccagtgcctaccaggaatggactttctggagaagctcagattaatcactccttatgagaggtgacagtgtgctggcagccctcacagccctcgctcactctcagtgcctcctctgcctgggctcccactttggtggcactggaggagcccttcagcccatggctgcatggtgggagcccctttctgggctggccaaggtcggagctggctccctcagcttgcagggaggtgtggagggagaggcatgagctaaaacgggggctgaccccagcacttgcctgccggctggagttctgggtgggggtgggcttggtggccccgcactaggagctgccggatggccctgccagccccgggcagtgaggagcttagcaactgggccagcagctgctgtgctcggcttctcgctgggccttagctgcctccatgtggggcagggcttgggacctgcagcctgccattcctgagcctcccccctccatgggctcctgtgcggcccgagcctccccgacgagcaccgccccctgctccacggcgcccagtcccatcgaccacccaagggctgaggagtgtgggtgcacagagaggaactggcaggcagctccacctgcagctcctgtgcagaatccactgggtgaagccagctgggctcctgagtctgttggggacttggagaaaatttatgtctagctaagggattgtaaatacaccaatctgcactctgtatctagctcaaggtttgtaaacacaccaatcagcaccctgtgtctagctcagggtttgtgaatgcaccaatcgacactctgtatctagctactatggtggggacttggagaacctttgtgtggacactctgtatctagctaatctagtggggacgtggggagcctttgtgtggggagctcagggattgtaaagacacgaatcagtgccctgtccaaacagaccactcaggctctctgtaaaatggaccaatcagcaggatgtggatggggccaggtaagagaacaaaagcaggctgcccgagccagcagtggcaaccggctggggtccccttccacactgtggaagctttgttcttttgatctttgcaataaatcttgttgctgctcactgtttgggtccacactgcctttatgagctgtaacactcaccgagaaggtctgcagcttcacttctgaagccagcaagaccataaacccaccgggagaagtgaacaactccagacatgcagccttaagagctgtaacactcaccgtgaaggtctgcagcttcactcctgagccagcgagaccacgaaccccaccagaaggaagaagcttcgaacatatctgaacatcagaaggaacaaactccagacacgccacctttaagaactgtaacactcaccaggagggtctgcggctccattcttgaagtcagtgagaccaagaacccaccaattccagacacgtttatagacttggcactgggaggtctgcatggagcaagtgaagaaatcagcagagtgaagatagagggagaacaacatgatgggggaaaggcaaagttactgccatgttggtttcaattctgccactcatgagtgagacccatgacctcctctctctaggactctgttgttcttatctgtagagtggaggaatagaagggccttttaaagtattaacatttcctgacctatctgtaaaacgctttcattcaaactgatgggaatcttgactactttgccaagaggacataacaatcatcaagctgaatgcaccaaacaacattgcctgaaactatctaagcaaaaactgagaaagttgcacaggacagacatacctcctataagaggaagaactctttagcacatgcttagtgtgtcaaagacaatgctgtgttcacaccattcctcttcctggacatgcagaaagactacatttcccagccttacttgcagttagtttggaaccatgtgactgcatttccaccaataggaatgtaagaaatcccttcaggccaaggttatcaaaggcaagtgtgagctatgttccctctcttcctatccatatggctacaagtgaaaaactctgagatggcagaattaaaagatggaaacctccagaatctctgaatcactgttggacaacggcccccaaggagaacccctgccctgcaccagactatgctatgggtgctaacccactgagagttcagggtttattcatctcagcagcagtctattgttaacactgactaacatcctaaggtttgagagatctagcatattgttaattgaagctagatttcaattgcactgagaaacttatctatttaaaaataaaaactctcctaaaaaaaacaaataatccacattccttttaacaacatgtggcaaatttgcaaaaaaaaccaaaaaaaaagcaaaaaaacaaacaaacaaaaaaaaccaactggccacatattaggccataaagaagtctcaacaaaatccactatacgattgacattgtccagaccacattttcctgaccataatgcaacaaaattagaagtcaacagcaagaagatagctaaacacaagcatgcattaggaaaattaaaaatatcctttcatgagttaaatgaaaaatctcaatagaaattactaaacatttacaaccgaacgaaaacacaacttttcatatatatatatatatatatatatatatatatatatatatatatatatgtatgtatgtatgtattttttttttgtgagtcttccaactttgttcctcttttacaagtttatttgagaaattccgggtctcctgcaattcctcatacagttttatgctgtttgtcatttctgtggctgggatgaacttatcgtagttctcatagaccagggtttgcatgtcgctgtctagagcccggatctgctgcaccatgtccgtctcactgtccatcagctgggccagaggggactctctaggcagcttgtctaggtaaacttccgggtcaaagtgtgccccgttcagatcagtggggtccagggggtcgggccctgcagggagtcccaccgcttccccttctgagaggccgttgtaaagctttagcatcctgtgcgccttccgccgacgctccgtgagcctccacatcggggccttctggggagtccccaggtccacaccccaggctaggcccagtgacagctgctgccgccatagctccaactgcagcccacgggcgtaactttttatatttttaagttggatatatggagctacttggcttttgctttcatcacatcgttgaggaaagaggtggttgcttatggtatccctgtttttactgcaacctgtaatggatgagagcctccctgttgcagagagcaaaacactgaactgaattgtgctataacacagccctgtgttgggggattgggagtgatcatgcaaacgcttgcaaatttgcacagtgacagagacaatcgtttgggcagctgttcactacatgaaaaggcaattgaccaaaagtcagttactgagctatctcaatactttcattttattttaacttttggcaacagggtgcaattaaaggagagaaagaaaacaaagtgataagtgtaagataatgtacacacatgtgtaaaagaaaatgacaagacagggtgactctttgtctcttggttagctccttgggctctatgtctccttcctcagagaacctcgttttcctttgtccagatttgttagggtggataatccaggcacctgctcccccatgatggaagccaaagacgtccctggagccgcctcccgctgcaccctttgctgcactgcccacatggacacaactcagccgattagacttcctctcagaactttagtcttgagcaaagggattaaagggtgaagtgactgaaggtatgcccttccaaagtagtacgtgagctaatggctaaagtttgtcaagcccatccaagcacattttttcgtaatttttatttatttatttttttaagacagagtcttgctctgttgcccaggctggagtgcagtggtgtgatctcggtttactgcaacctctgtctcccagcttcaaaggagtctcctgcctcagcctccccagtagctgggattacaggcatacgccaccatgcctggctaatttttttttttttttttttttagtagagacagggtttcaccatgttggccaggctggtctcgaactcctgaccttgtgattcacctgcctcagcctcccaaagggatgggattacatacatgagccaccgcgcccagcttccaaaagttttaagcagagctcagaggtcttaaccacaggcacattggaggagcatttttgaaacgctttccagcttcctcaataggaatggaagccaaactccgaactgatgactcctttgaggaagtcgagagctgtaaggaaagccaggaacaggggcaagggagagatgcatcccaaatgatcctgtgccaattctttctggaatccttgatgtgatctcagctgccctttctatacatgacacagtgattgtggcacccactggtctagctgtggtctacaaggaacccccaaagggaagggcacagtgagcaggggcatcggcctcagtgacgaggatttgagagggcaggttggatgcagggagaggactggccaaatgccatgtgtctggacttagactgcctggttcaaattggacgtcaccctttttgacttcgtgatctggtacaagctacatgaaaatccgttgcaccttttctagtctgtaaaatcatcatgaaatgtgcactaataacgtggagactatgcagatgaaaagaaacaagctgcatagagcacagagctcagagcctgtcctttaggaagccctcagtaagggttcatgatgccatggtgtctgtcatcatcctctttatcctcatcatcaccttcataatctctttgttgttcttagggaatagtttagagggactgattccctgctatcatgggtgagatgtctatgaaaaggacaaccagtgggggaggaaagcaaaattttgaataagatttctgagacccccagcacaaccaagagcagaaactccacagtctgctgagcgcagagtttgcatattggtctcctcccatctgcccagcgcattctcctgtttgttctgaggaggaggaaacaaacaaggctcccaaccgtccctcagcactcacttgaaggggtggcctgcccctccacacctgtgagtatttctagtcgggtgggacgagagactgagaaaagaaataagacacagagacaaagcatggagaaaaaacagtgggcctaggggaccggcgctcagcataccaaggatctgaaccggcacaggcctccaagttccctcagtttttattgattattatttttattattttagcaaaaaggaatgtagtaggagggcagggtgataataaggagaaggtcagcaacaaacatgtgagcaatagaatctatgtcataaggaagttcaagggaaggtactatgactggacgtgtctctaagccagattgatgtttctctccacccaaacatctcagtggagtaaagaataacaaggcagcattgctgcaaacatgtctcgcctcccatcatagggcggtttttcccccatctcagaattgaacaaatgtacaatcgggttttataccgagacattcagttcccaggggcaggcaggagacagcggccttcctctctctcaactgcaagaggctttcctctttgactaatccacctcagcacagaccctttacgggggtcaggctcgtggacggtcaggtctttctcctcccacgaggccacttttcagactatcacatggggagaaaccttggacaatacggcgctttcaagggcagagctacctgtggctttccacagtgtattgtgcccctggtttattgagactagagaatggcgatgacttttaccaagtatactgcttgcaaacatcttgttaacaaggcacgtcctgcacagccctagatcccttaaaccttgatttcatacaacacatgcttttgtgaaattcaggttgggtcaaaatggtttgttcaaagtgactggggcaaagctacagattaacaacatctcagcaaagaaattgttgaaagtacaggcctttttcaaaatggagtctcttatgtctttcctttctacatagacacagtaacagtctgatcgctctttcttttgcctacactcactgaactgcccttcccctctgctgggccatgaccacggagaacaggtccactgtcctccctgtgtggtgcaccatggaggctcagactccgtcctcaaggctggcaagatgacagggtaagacatgagcctcctgatacaggtgatgtctctggagcccacaggactgcaacctcacactgcagggctggaggcacagactgactatttactattctgtggcctgggggctcaaggcacagagctcctcattagccaaagtcacccaagttccccaaccactaaggatttcctcataataatgcaagaagaagagaaaagtgagtgtccatagaagctttggggctcttcctctaatcaggagaaagctggtgtgtattcttcacttctttcttttctttttaaacatccaactgctttaattttcatcttttattatgggaaaatataccacgtataaatatgaaaaattataaatatatattagttcatatagaatggccagtataaacatttacagtttccactctttttcagtttacagtttcatgacattaagtacgttcacattgtttagcaaccatcaccgtcatcgtctccggaacagttttatctttcaaaatggaaattgcacccattcaccaagctctccactcctctctcttgcccacccctgggggccccctttctagtttgcaactctatgattttaactactctagacacttgatagataagtggaatcaaaccgtgtttaattttcttgttttggagacagagtctttctctgtcacccaggctggagtgcagtggcgtgatctcggctcactgcaacctccacatcgtgggttcaagcgattcttctgtctcagtctccagagtagctgggattacaggcgtgcaccaccacgcccagctaattgttgtattttaaatagagaccatattggccaggctggtgttgaactcctgacctgaagtgatccgcctggctcagcctcccaaagtgctggggttacaggtgcaagtcactgagcctgggcgtgtttatccttttgggattcatttatttcactgaggataatgtttgcaaggttcatccatgttgcggcctgcctcagaagtgcctctctgtttttttgtttgtttgtttgttttttgtttgttcgtttgactttgttttgttttgttttatgtttccatggagtctcactctgtcgcacaggctggagtgcagtggcacaatctgggctcactgcaacctccgcttcccgggttccagcgattcttgtgcctcagcctcccgagtagttgggactataggtacaacgccaccatgcttgtctcattttttgcattttcagtagagacggggtttcaccaagatggccaggctggtcttgaattcctgacctcaggtgatccgcccacctcggtcttccaagacgctgcgattacaggcgtgagccaccgcaccggccagaagtgcctgcatttttaaggctgaatagtcctccattgtatgaaggaactgcagtgtgctttttcattcatctgtccacgaacccttgggttgcttccacattttggctgttgtgaataatgctgctatgaatatgggtgtacacaaatctgtcttccactcctggcttctaattctttttggtaggtacccacaaatgcaactgcgggaacatctgatcattctgtttctaatttttccagtagacgccatactattttccctgttccttcacggttttacattccctccaatcatattcgagcattcctacttccctctagtctcaccaatgcttgttttttttttatcatatccatcctaatgtgtggtatcacattcttggtttgatttgtgcttccctatgatgagtgactttgaatatcattttagatgcttattggccattgctatatcttctttaggaacacgtctactcgagtcttctgaccattgttgatgggatgctttgggtttcttgttgtttagttctagctgttctttatatatgatggatatcagcctcttttcagatatatgctttgcaaatatttttcctaatccatgggttatcttttcactcagttcacagtgttttttgctgcacaaaagtgtctgtcatttagatgtaatccaaggaatctaattttcttttgttgcctatgcttttggtgtcatatcccagagaacattgcccaatctgatgtcatgaaagcatggccaatgttttcttttaggcgtatgatacttttagcacttggggtgaggtctttgatccagtttgtgttaatttttgcacctggtgtgacatagggtccaccttcattcttctgcatgtggaaatcaagtttctccaacaccatttcttgaaaaggcttcttttccaccaatgagctttcttagcactcatgtgaaaaatcatttgaacatatagatgagaagttatttctgggctccaaaacaaacaaacaacaacagacaaaagataaggatacagcatgggccaggcgctgtcgctcacgcctgtaatcccagacctctgggaggccgaggtgggcggatcacctgaggtcaggagttgaagaccagcctgaccgacagggagaaacccccgtctctactagaaatacaacattagctgggcgtgctggcgcatgcctgtaatcccagctactcgggaggtggaggcaggagaatcgcttgaacccaggaggcagaggttgcggtgagccaacattgcaccatgacactacagcctgggcaacaagagcgaaactccatctcaaaacaaaaacaaaaaaccagcatgatttcaagagcagaaagagaagagcttaaaaaccagcataatgagaaagttaggaagtttcttaccaaagcatctggaaatatgcaagcaattcttgtgaagtaaaattttcatactgtgctatgaaacactggaactcacttattccatctttctgtattttgggacccaattatccacttgtcttcattccctatcgcaccccttttcttcctagcgtctgctgatcacctttatactttccaccttcctgagattccttttgtgtgtaggtgtgtgatggagtctctttctgttacccaggttggagtacacaggcacaatcagggctcactgcaagctccacctcccaagttcaagcgcttcttgggcctcagccctctgagtagctgagactacaggcacgcgtcaccacgcccggctcattgtttgtgttttccgtagagacagggtttcaccatgttggccaagctgatctcgaactcctggactcaagtgatccgtgcgactcggcctcctagagtgctgggattacaggcctgagccacaacacctggccaaggtttccttttttcttcttacatagaagtgaggacatgaaatatttgtcattctgtgcctggcttctttcatttaatatacagacctgcaatctcatccattttgtctgcagcggagaggagtttcttcctttttcggctgaataatacttcactgggtgtgtataccacagtttcttcattgaaacaaatttctgaagagcaaatatttttaaaatgtctcagaatgtgaaacctcagggatactgtgtccattttattcttttctatttcctatcttatgtatatgcaagtgtataacaaagcagcaatcaatgtgtgtataaatctacaacttcaacaaatgtaaaatgtaaatgctaagtggtggctgggcgcagtcgctcatgcctgtaatcccagcactttgggaggcggaagcgggcggatcacctgaggtcgggagttcaagaccagcctgaccaaaatggagaaacactgtctctattaacaatataaaaaaaaaaaaaaattagccaggcatggtagcgcatgcctgtaatcccaggtacttggaaggctgagacaggagaattgctcgaatacgggaggcagaggctgcagtgagccgagaccgtgccattgaactccagcctgggcaacaagagtgaaaatctgactcaaaaaataaggaaaagaaagaaatagaaaatgcgaaatggtaagaaacaacaacataataaacatttgtatggtgttgatggacaatgcatttgaagataatatttgaagaaatcatattacaattaatttctgttcttactcattggagcttgatgcctctaaaaacttcgtcattggaaccacctctggtgctttaaaagaaaaaaaaaaaaatccacatactcacacaggtgcaaggaaatcagaatctcaggtattgagacccaggcctcatcatttgtaagctccccaggtgatttgactcaaagccaagattgaggaatggcgacatggatctctacacagaacctgcctaaatagattctctagaagcagtttataaagatattccacgtggactgtggaagaggatatgaatttgatgtacagcatgtcctcacttaacatctttgaaagtctcttggaaacttcacctttaagcaaaattatgtatagtgaaaccacttatttttcatcaacagtataactacacatctttgaacaactgatggtgttggaggacctcctgtacattgtttccataaagtcagttttcagggaattccaaaaggaagtgaggacttcgtgtatataaaaagatggttgtgattccacctggatgacagggttattgctcagaaactaaaagaggccacctaggtatagaggattctgtcatgaggtttctgctaaacaaagggtcccagaatcctcacccattccagtgaaaggcatagcgaagaaagcaatattcacaaaggaaatgtggaaaggaataaaagccatcaagccacagaaagaatgtgactaaggggcaggatttgcagatgtagagatttaatgtggttgccctttctcacccacacaagagaaaggatggaacaaatcatgagattcgactgttgtgctgtgcagcctccacagggcactttgtatgttcctgtttctcaggctgtagatgaaaaggttcagcatgggggtgaccacagcatacatcactgatgccaccacaccattcctggggggttgtgacacagctgaagtcaggtacatgccaatgcctgttccataaaatcagcaaacaacggctaggtgagagccacaggtggagaaggctttatacttcccatctgacgatgaaatccttagaatggaggggatgattttatagtaagaccataggatccctgaaatgggaagaaaaccaaacatagtactatcgaaatatatgaatatgctattgatgacgctgtcagaacaggcaagtttgagaagttgagaggggtcacagacaaaattagagatttccaaattctagacgatggtgaattgtaacacaatccaactgtgcagctgggaatccaacaggctaaggaaaaaggacaccaaaacgaagacacagaggtgaggattcacgatgactgggtagtgcagagggcgacagatggctacaaagcagtcataggccatcacagtcaggagcatgccttctatacatgcaaaaaggaccaagaaagacatctgcgtcagacagcccgcatgagacgtgactctgctatgcgactgcatgtccacaatcatcttgggaaccgtggcggaggtgaaaccgatgtcagcccagcacaggttggagaggaagaagtacctgggggtgtggaggggggagtcagagcagacagccaggatgctgagcaggttcctcagcaccgtgaccagatacatggacagggacagggacagcaaagcgaggataggctgcagttctgggtcctctgagagtcccaggaggaggaattctcagacacctgtgagattccgtggctctgtgtgtcttggacaccttgagaaggaaagaggattggaaaaatagcagataaaaaccagcccttaatgctggatgcaagcaattcacaaggaacatcttcacacttgcggaccatacaccgccagcaatgtttctcagttgtgacaattccaaaaaatctcagaattattacgtgatttacttttttgctatacaaggctttctgtacatactactttagagaaaatccactgaagaatatcagagaccaaaacgttatatataacaaatccgtgatctcagtaaaatacggcctactcttttcagaaaaaatacaatgcaatgacaatgtcctttctcttgaagaaaaagatctcagtctaattgaaagaaattaagaagccgtgaaatgcactctactttattctgaccccgtgctacaacttccattgatgtagaatatgtaaaaggacgacacaagagctaggaccccattatctgaaaacgacatcgaaccttatagttctcaatcgaaagattttcacatgcctgttacttttcatatttattatcatccttcggttttctgacatcacttcttcataaaagtacatgcacgctcaaagatgggagctgtgtttccaaatgaattgaatctataactcttggcccagcaccatggctcacacctgtaatcccagcactttgggtagccgaggctgatggatcacctgaggtcaggagttccagaccagcctggccaacgtggtgaaaccccgtctccagtgaaaataaaaaaacattagccgggtgtggtggcgggtaaccctagctactcgggaggctgaagcaggagaatcccttagaacctggaaggcagagattggaaaccctgtgataggatttttgacagcctagggagatattgcacctgacagcagagtcggcgtacaccctgtgatattatttgtaatatcctagaaagatatttctcctaatatcacagtggctgtacaccctgtgatcttaattgtaatatcctacagagatattactcccaataatacagtgggtgtacaccctgtgatattattcataatatattacagagatacgactcctgatatcacagtgagtgtacaccatgtttgtacaccctgtgatcttatttgtaacaacttagaaaaatattacagctaatatcaaaatgggtgtgcaccctgcgatgttatttgttttctactaggtagatattactcctaatatcacagtgagtgtacaccatgtgtgtgcagactgtgaaattattcataatactctaggaagatattattcctcatatcacagtgggtgtacaccgtgagtgattttttttctaatatccagcgggggagaggatgatattgcttccaatatcacggaaggtgtacaccccgttgtgatattgttcctaatatccagggaaggagaggatgacattattcccaatatcactgggggtgtaccacctccctccgggatattgttcttattgtcagtaggtggagagaatgatgttactcccaatatcacagggggtgtacaccacccctgtctgtaaacaccccctgtgatattgtaccaaatggcctgtgaaagagtcaatattactcccattatcgcaggggtgttcagacctgatgatattgttttctaacatccagggaaggagagtatgctattattcccaatatagcaggggttgtacacctttttgtgttattgggcccaatatccaggaaaatagaagatgatagtactcccaatattgaaataattgtacagcacccttgtgatattcttcctaatatccagaaaggaaaagaatgatattactcccaacagcgtaggaaatgtatacccgctctgtgatatctttccccatatccaggtggggagaggatcatattacttccaatatcgcagggtgtgtacaccccctctgtgatctcgttgctaacatccaggtttggggaggatgacatgactcccaatatctcagggggagttcaccccccatgaccttgtttgtcatttccttggtggagaggatgatattactcccaatatcgcagggggtgtacacacccctgtgaaaatcttccttatatccagagggagagaggatgatattactcccagtaccgcagggtgtttccacagccctgtgatactcttcctaatatccacagggagagaggatgatatgactcccaatatcgcagggggtgtacacccctcctgtcctattgttctgaataccctgggagggagaagataaggtgacattgaatatcacagggaatgtacaccctccccctctgatacccttcctagtatccaggggaagagaggataattgtactcccaatatcgcagaggcagtacaccccacctgtggtattgttcccaacatgcaaggggagagaggatgatactactcccaatatcgcaggggtgttcacatccccagtgacatttttcctaatatctaggggagagacaattacatgacagcaaatgtcgcagggtctgtacatcccttcttgatattgttcctaatatccaggggggaagaggatgatatcgaatatgaaagggggtatacaacccccacccctaagatactgttctcaatattcttgaggggagacgatgatatgactccaaatatcgcaagggttgttcacacccccctgtgatactctttctaatatccaggagggggagaaaataacatgacttctaatattgcaggtggtgtaaaccccacctgaaatatggcaccgaatatccaaagagagagaggatggtattcataccaatatcgaagtgtgtgtacacgccccttgtgacatggtttttaatatccagggggtgggaggatattagtcccaaagtcccagaaggtgtacactacccctgtgatattgtccctaacttccagagggaagaggatgagatcactcccgatatctcagaagttgtacatcccctgtgatactgttcgtcatatccagggaggcacaagatgacataccattgaatttcacgacaggcgtacacgcacactgtgatattgttcctaatatccaagaaggcagaggatggcattactcccaataaagcagtgggtgtacactacccctgtgttattgcctctaatatccggggccgggggagggggggagaggataacattccctcaaatgtagcaggtggtttgacgcccctcgtggtgttgttttacatatccatcgcggaagacaataatactattttgatagtccgattcatcccctccacctttccggaactctgaggccgggaggcagcaggcaatttccgtgtgatccccaattcctttgccgtcttctgtagcaagtcagccacaaacgcaggcccgttatctgagccgatccggaagggcagtcccaatctacgaatcagatctcgaagaagcacacgggttacttcacgagctttctcagttgtgttggataagcctccacccacccagagtaggtacggccaagaactagtaaatacttgttacctccacactttggcatctctgtgaagtctacctggagatcttctaagggggctgctccataagcttgtatgccgggtggaacggctggaccttgcctcgctttatgctgtcggcaggtaacacaccgctgcctcaccgttttggcaagggctgagaaacgcgagatgtagaaataccggcctaacaacttttccagtgactcctgacctcgataggtggtttcttgcacagccagtacaactgcagctcctagcagctgtggcgcagctactctccatccttcctccatcacttgtccttccctctacctggacaaagtccttttcttctttagaataagcaggtccaagatcaggtgcttgagggagcagaggagctgtgactgatgcctggaaacgggcagatgctgcttttccagcctatgagtcagcgcgggaattccccaagcccaccaaggtggaagctcgctggtgtcccctgcaatgcataactgccaccttgtggggtttccatactacttctaatacatagaagatttctggttgatattttctgtcttttaccccagagtttaataggcccttttctttctatcacgctccatgcatgtgaagggttcaaaagacataccgagaatcagtgtaaatgttgacagtctcaccctcactgagctctaaggcccaaatgaaagcaatgagttcagctttctgggctgaagtggcctggggcaacgatctggcttcaacaacagtgtccagggttatcactgcataccctgcacctctctctccttgggggttgaagaagctgctcccatccacgtatagttcccagtctactgatgcccaaggctggtcccagaagtcaggtctgctagagtcaactgagtccaacacttctacacaatcatgctcgacggggctctctgatagcgggagcaaggtggcagggtgttacaaacttcaatggttacacggggattttcacagagcaaactttggtacttggtgagtctggcattcattagccaatgatgtcctttaatattcattaaagtcaccacagcatggggggcctttctgttcaggttctgcccaagagtcagcttctttgcttcttgtactagcagggcagttgctgccaaggccctccaacacaggggccatcctttagagaccccatctagttgtttagagaggtaggccaccggcctcggccaaggccccacagtttgggttcaaagtccggctgccatcttttctctctctctgacacataggatgtaaaagactttgtcagatcaggtagccccagggctggggctgacataagtttctcctttaactcacgaaaggcttgctgttgttgggatccccattcaaaaatttcccatccccgccccctttgtgaccttatacaaagtcttggctaatactgcaaagtttgggatccgcagtctacaaaaccccacagctcctaagaattctctcacctgccttctgctcttaggctctgctagattgcaaatgaccggctttctttctgatcccgggctgcgttccccctgtcggatactaaatcccaaggaacatacctgctgtcagcagatctgagcttttttcttggacaccttacacccacagtcctccaggtgtcggcgtagggcaatctgttcccttggtgcacccgactgccatgaggtgtcccagcaaaagctcatcaacctactggagcaatgcgcagcctaggtctctggtgggaaacttctggaggtctcaagccaacgcctccccaaagatggtgggggagttcttgaacccttggggaagcccggtccaagtgtactgagtagtgacacctgactccggatcttcccactgaaaggcaaacagcttctgcctctcaggggctaatctgatagaaaagaaagcgtctctcaggtccaagcaggtgaaccagctgtcctcagctggcagcaaccccaacaacatggacgggctaggtactgttggatgtaaagtcagggtagcttgactaaacaagcgcaaatcctgtcccagcctgtaatccttggtccatggcttgggaacaggcaggaggggagtgttctgtggagactgacaaggaactatcataccaaaagttcttaggtgcttaagatggacctggataccttgaagagcttctctggggaccaggtcctgtttttgcctaagtggctgggccccagtcttaactagccaaccctggagggttgtcttctgcccgtactcttggcctctgcttagccagagctggtcttctctcttggcccggttcagttcacaaaagtctccattcctcctctcgggggaccataaggtcataatgactcccgtggcgggtaactttagcagcaaagagctgtgttctgtcaaagagagagcagctctcagcttgctaagcaagtcccttcccaacaagggcaagggacagtcaggcatgtacaaaaactgatgaatcacttgatgtcctcctacagtgcaagtcccaggcaagcagaaagcttgctttgctgaaacccccatggctccggtgatgtcaagggtctttctggataacgggcgaccggagcggttactagcgaatgttcagcaccgctatccacaagaaagtcaatgtctctacccccgactctcattctaaccagaggctctttggagacacttgagcctggtctccctcagtccaataatccttttgccaggttgagccgggccccttcctccttgtccggggcctcctgctctgagtcaccttgttttcttttgagctcagggcatttgttcttccaatgtcttatttctttacaataagcactctggttacgctgcaaactctgacagccaagctgagtttctttcccagggctccccttcccttgcttctttggggggacagctctgattgctgcagctaacaaacaggtcggcgttttgccgggcctgatctccattctctttgcgctttccctcgtggcttactgtatccctgtttacaaacacctgcttagctatttctcatcaatgtgatgtattcctccctgcaagcccagcctgcttctgcagttttcttctaacgtcttccgcactttgacggactaaagccatttgaatcatgcgctgattttcagggttatcgggatcaaggggagtatacataccataggcctcacacagtctctggtagaattgtgctggactttcttcttttccctgaatgacttcagagaccttattaatatttgtggccttctgagctcccctcttgaatccttccaagagagcttccctgtctcggtttagcctttgcatatcctctctttcatgtgggtccaactgggggtgggttcctggtaactaggtccttccatactcttgggggttttgataatcagctggtgcatgttcctctagccacttagttgctgcgtggagccctctccgcctttcgcctttcacctctcttaaagaggaacatgagcaaccggtggcgatcagcccaggtggggttgtgggtctggataacagtttggagcaaatctattagggcttgcggcttttcgctctaggacggggtattgttttcccagttgagaaggtcggcagaggtgaagggcttttacacaaaaacacgcctctccaccacgtgaccatcctcctctctcccagtataccgctgctctctcaggggcatttggatccccgttttgggtcgtaaacgagctgccaagggaggggtggaatggcgcaatgttacttaccgcaattaataatatcaattattaattgatactgataattatcaatattaataactgatcatataattcttaaaatcaatacctataataatgataattcatattaaagagctatactcacaataacaacaaatgatgaatgttaatgattaatgacgcctggtcttagtgatattgatcttattcattagaaaactgtcatattaactcctaataattaacattaattttaataatctgaacacttttttagcaatgatttcttaatattaatattagtaatacatattcatgttaataataaatgaggaagaattaatacgaatattatccctaatacctcagtgggtgtacacccacctgtgatattgttcctaatgtccagggagggagagagcatgatatgactttcaatatcgcagtaggagtacacccacccggtgatatttatccgaatatcatctccagggggtggcgtatgacgttactcccaagatagcagtgggtgtgcatccacccggtgatattcctcctaatattcccggaagaagagaatgctattactcccagtatctcaggaagtgtacaccccttctgtgacattgttcctaatatccggaggggagagggtgatattactcgcaatatcgcaggctgtgtacacccaccctctgatattgttcctagcagccaggaagtgagaggacgatatgactccccatacagcaggaggcgtacacccatcctgggatattattcctaatatccacggagaggagaggctgatatgactcccagtatcgcagggggtgtacatcctgtctgtgatattgttcttaatattcaaaggtggagaggttgatattactcccaatatcacagaaagtgtacaaacccgtgtactattgttgctattatccagaagaagagaagatgatatcacccccccatcgcaggaggtgcacacccactctgtgatattttttccaatgtgcagggcaggggaggataatactcttcttcatagcacacggtgtgtacagccccgctgtaatatggtccttaatattccaagcggagaggatgatcttactcccaatactgcagaaagtgtacacgaccccagtgatatggtgcccatgatccaggacagaagaggatgatgttactttcaatatcgcacagggtggacacgcccccagtgatattgttcctaatttcaacgtgggagaggatgatactacacggaatgcccctggggtaaaaacactcctgtgatattgttcttaatatcaaggggaaagaggatgctattactccaaagagcgcagaggatgtgcacccgtctgtgacatagttagtaatttccagaggcggagaagatattactgacaataacgtgaacacactgtgtgaccaccgtggatcgtcatatccgggggggagaggggggtgatatgactccccgcatcgcggggggcgcccgcccccctgcgatgtggatcgtcatatccaggcggggaggggggggtgatgtgactccccgcatcgcggggggcgcccgccccgctgcgaagtgaatcgtcatatccagaggggggtgatatgactccccgcatcacgggggcctcacccccttgcgatgggggtcctaagagccagcgggggataggggctggctcttactccccgtaccccgggtggggggcctcacccccctgcgatgggtctcctaagagccgggggagagagtggctggctcttactccccgtatcccaggaggtgtgtacaacccctgcgatattgggagtaatatcatcctctccccctgaatataagaaacaatatcacaggaggatgtacaccccctgcgatattggaagtaacatcattttctccccctccggatattcggaacagtatcacagtgggtgtgtacagctcctgcgacattgccgctagtatcttcctctccctcccaggatagaaggaagaatgttacaagggggtgtacaccccctgcgatattggctataatatcttcctctcccccgctgccttttaggagcaatgtcacacaaggggtgtacacccgcggctatattgggagtgatatcatcctctccgtccctggatattaggaacaatatccctagggagtgtacacatcctgcaatattcagactaatatcatcctctcgccgcctggatattaggatcaatatcacaagggtggtgtgcacccccggcgaaattggaagaaatatcatcatctccacctttggatgttagggacagtatctcgggggaggtctccgccccctgcgatattgggagtcatatcatccgctcccacccaggatattaggaacaagatgaccgaagggatgtacgcccactgcgctattttcaataatgtcatcctctaccccctggctattaggagtcacatcatagaggggtgtacactttctgcgatattgggagtaatatcctccccccacggatatcgggaacagttctattgattattaatattacaaatataataacaattaatagtaatcatcaatattaataattactgtagagacagtaaaacagtacggatgaaaaatattaacggttactatttataattaatagcaatttcagtattaataataaaataatgatatcactaattaatgttacttcaatcataagtgatgttggtaataaaacaataattaatattaagattaataactaatattaaaagtgacattaatattaataattaattttaatcatgcataatcatatctcaaaaataatcattaatgattaataacgttatactgttaattaatattaccattgataattattaataagactgatgtttaataattcagaatattattactgctaataccgcagggggtgtacatctacttgtgataatgttcctaatatccagggatggagagcatgatattagttttcatatcacagtaggtgtacactcaccctgtgacaccgatcctaatacccagcttgtagagtatgacatgactgccaacatagcaatcaatgtacagccacccggtgatattgctcctaatattcacggaagaagcgtatgatattactcccaatatcgcagggagtgtacacctcttctgtgatattgttcctagtatcccgagggggagagggtgataataattccagcaacgcaggctgtgttcacccagcctgtgaaattgttattaatatcctgaaagggagaggatgatattactccccataatagagcaggaggtgtacacccaccctgtgatattcttcctaatattcagaggccgagaggttgatattactcccaatatcgcaggaagtatacacccctgtgtgagatggtccttcataatattccaaggcggagggggtgatatgactacatatatggcagaaagtgaacaccccccagggatattgttcccatgatcctggagggaagaggatgatattactttcaatatcacagaaggtggacacgcccccactgatattgtttctaattgcaacgtgggacaggaggatatgacacgcgatatccgagggagtggaaacacccctgtgatactcttcttaatattcatggaggaagaggatgatattactcccaatacagaaaggtgtacaccctctgtacactgagggtatacacccatctgtgaaacagttcataatctccagagggggagatggtgttgctcaaaataaggtaaacaggctgtgagtccaccgcggatcctaaaacccagggggggaagaggggctagctcttactccccgcatcgcagggggtgcctcacccccctgtgatgggggtcctaagagccagggggggagaggggctgttccctacgttggggcactgaggtccctgttttcttgtaagctgccattggggaccactctcggcttccaggggcccccttgtaggtggcaccatggccacttgccctactccaagcctgcagaagagcgcctctctgccatgtccctttcttttaaaagacttgcctgactggttcaggtccattaggtagcgtcccatttgattagctcaaaagtactgtagcccatcacattcactcacaggagggcattagcggggtgtggacaccagggagtgagaatctctcaggccagtttagcattcagttggttagccaggttcagtggctcacgcctgtaatcccagcactttgggaggccaaggcgggcagatcacctgaggccaggagttcgagaccagcctggccaacatggtgaaacccagtctctactaaaaatacaaaaattagccaggcgtggtggtaggcgcctgtaatctcagctacttggaagcctgaggcaggagaatcgcttgaacctgggaggtggaggttgcagtgagccgagattgtgcctttgcactccagcctaggcgatacagcgagtctcaaaaataaataaatgcgaaggctgctgagcacagtggctcatgctttataatcctggcactttgggaggccgaggcaggaagactgcttgaggccaggagtttcagcctagcatggacaacacagtgccactctatctctaagtaaaataaaataaaataaaataaaataaaataaaataaaataaaataaaataaaataaaatagtaaaataagaattcagttggttaaaagaaactcactaggtccagcccacaatcaagggatggaaattacacaaagttgtgaagagtcaagggtgggagatcgctggcagcccttatagatgctgcctatctcacatacctgttggacagcttctctctcctagctgggggtatttggagcgggtgtcgaatcctgctcttttttatgtctgttgccttttctcgcggtgatgtgtttcctgtgtgttctgtaattttggatcgtgagctgagcttcagaggggctttagtggtcccagggtaccactaagccaaggcaacttttatttttgagacagagtttccctcttgttgcccaggctggagtgcagtggcgcagtctcagctcactgcaacctctgcctcccaggttcaagctattctcctgcctcagcctccagagtagctgggattacaggcacacgaggcttggctaattttttgtatttttagtggagacggggtttcaccatgttggccaggctggtctcgaactcctgacctcaggtgattcacctgcctcagcctcctgaagtgctgggattacaggcgtgagccaccactcccggcccaaagcaactttttagtgttaatttctcaactctggcattcctagaccacacaggtggcatgactttattgtaggagttccacatttacataagagaggcctgaaaacgcaacgatctcatgggaaacttgttcaccacctaaagctcaaaatttctcacctctctctgttcccctgggtggaaatgtttctgtccctttctctaaaggtgttgcatttctgtggccccaacttcatcatgcttgactgtaaccctaaccccctgccttgtaagggataccaacgctcaacccagccctgccctcaggcagttgcagcaccagctcctctgtccccaccttggttctcactctcctcttcacttctggccttaggggacttaacttattttctgaagaactcagctatatatttattttattttatttatatattttttgagatggagtttcactcttttgcccaggctagagtgtaatggcgtgatcttggctcactgcaacttctgccttccgggtttaagcgattctcctgcttcagcctcctaagtagctgagattacaagcgcctgccaccactcctggctgatttttgtatttttagtagagatggggtttcaccattggccaggctggtcttgaactcctggcctcaggtgatccgcctgcctcagcctcccaaagtgctggaattacaggcgtgagccaccacgcccggcctcagctctatagttaaaaggacatttgtttcttacccagcatttctaggtgttttgaagagggagacttctcaggttatctaacctgctactgagaacttaaagatagggaaaatcttggactggagattcttggaatcacataattgaaaaatcccagctgggcgtgatggctcacgtctataatcccagcactttgggatgccgaggcaggtggatcacctgaggtcaggagtttgagaccaggttggccaacatggtgaaacttcgtctctactaaaaatacaaaaaaaaaattgcctggcttggtggtgggcgcctgtaatccccgctactcgggaagctgaggtaggagaatcgctggaacccaggagatggaggttgcagtgagctgagatcatgccattgcactccagcctgggcaacaagagtgaaactccgttgcaaaaaaaaaaaaaaaaagaaaagaaaagaaaagagaaagaaaaagaaaaatccccacagtgcagatcgacaaaatcacagagttgctttgggagcgagggtggcaatcagacacggaggccatgacacaacctgcttatccactcaggggtccagaacctccacccagtcaccttatccgggggtgatggagacaggggaggtgccacctacgccagtgtcatctcttacaatgagctcttctcctgctcgaaaagagccagcctgctgagcttgctgccagggcccgtcgcactgcctgcgctgtgttgcccgtcgcacagcctgtgatatgtgtttcccatcatgtgtgcatgtgtgttgtcatgtagtgtctgtcacaggtgttacccgtcacgtgtgtttgcatgttgcatgtgtgtggcctatcaggtgtaaatatgtgttgtctggcacatgtcagcatctgggcattctccgtgtgccaggagcagccaggtggcctgtgaagccttctcatgggaaatgcccagataggaagagcacagccaggagccaagcccctgagtggccactccatgtgcctggatcaccttcaagtctgctcaacatcacagcctctgttccttggcaccatggacattggaattgactcggaactgggaagagctgtaggcccactatccaggcacctgctccccgtttgcccagcatcccaggggcccacacccttccaaatatcaccttgccctccattcagaggtgaatcatctgagcgtcaggttgcccaactccgactggttttgctggagcctgcctagaggatgtcgccagccacctccagagaacactcagtctacagatgccgagggggaactggaagcacacagtgctggccttcacccaggttatggtggcacctcgggaccgcttctgagtctgcttgtcactgaaggtcggcgtgaggcaggcagcgttccctcccagatttagaaaatgtcaagtctcccgccgcacccttttgtgtttcttacagggcctggtgcgcttgctgccgccacactaagggctccaacatgttccctcacacactcaacagagaaggaacctgtggctcagatggcagactccctgtccaaggccacagagtctggccccagggaccactagaggcttcaagaaccaaactcacatgagggcagagaggagagatggggccagtttagggctgggagaatccatagagcgatgctgaggcaggcatggagcctggaggtacggacgagggtctcgccaaagtcaggggtaaagaggctgtggggagtgaggaatggtgtgggccagccccgggcctgctggggtgcagctgggggctccatggccctcccacggcccccacttgtcctcacccaaccgttcagagctcttcatggcgggggtgtcctctcctctggccacaagaggagcgggtggaggaacggcaccttcaggccttgtagggggtctgcccctccaccagcctgtttctcgtgggcatcgcagctgaggctgtagccgggaaagggtagtcaccgagcgtacctggcctccaaccaccacttccaaggcccctactgggcacagggtgaccccaccgtggctcggaagtggaccctgtccgacgcgggggtggtcgctggagggcggaggatgcctacacaggcctctggagggtgtgtctcgggagtctgtctcgccctctggacccatgggggaccagcaacgccgtcacaccctcctctgtctctgccagccgctccgccgctcccttctcctggctggggctggcaaaggcaggcaggtatgggggggcggggcctcaggagggaggaagggctggtgggcggggcctacggacacctcgccccgcccccagtagggcgcggcactccccacaccacgcggtccccctaggtcagggcctgtcaccactgcgcccagaggccgggccagccgtgcgtgcatcccagggcatccgtgcatccgtcccccgcggcctgggactccccagtcaggacagtacaaaatctctttattgctcattttctgtaaaaaatcgtggctctcggcggaccctggggataggaggtgcaaagtgcgctcacacgcggcccgggtccgcggccgagagctgtggggatctggagcgggccgggtcgcaagaagaccctgaccgtgctccggcgctggggcgcgtgctaagggcccgcggggtttcagctgtattttcgaacccctgtgcttggccgaggggttcccaaggctccactccgccttggagggggctgcggaagcccggaggtgacctgggctctgggaggggcgtccccaacgtgggggaggggagacaggggcctttgaagacagcgcgggactcggagggggtccccccgacctcagacgtggtaaactgaggccggcgaggagggaggctgagtccggggaccaggcggcccctcactgctcctccggcccgtctcccccctgcgcctgttcgtacgggcagggccggcggccgagtccagcgggctcggggccaggcctgggccctgcgggcggcgcctcctcctccgcgccgtccccatgctcgccctccgcgtcgctctcgtccgagttgtcctcctccaagtagcggtaaccgcgcaccttgtgctggggccgcgggatgcggggctggcgcggggccacgccccggcgcagcttctgctccatccgcaggtaggagaccgcggccgccaccagcgtcaccagcagcaccgccagcttagcctgggcgtaaggagagggatgccagggacccgcggccgcctcgccccgcaccttccccgcctatgcccctcgctgagataggcccttccctcctccgggagcctcccgggccacgcggccctcaacttctccagcccctccacccatgcttcctggaccgcctcctgcaggcgaggctcacatccagcactgtcccttacagtcgccacgcccctggcgacctcagtgtcccacactgtaaggggacaatgcaaatccctttgcctcatagggtgcatgcgccagtgttgataaagtgctggccacaggccctgccttcccagggctcacaacactgtgtccctgacacacccgtgggctgtagtgatgcttttcatggggttttgactataacccgcagtcaggaatgatttcacaccatagcccagtacatacacacatatctgtatgcatacttcctgctcttttcttttttccagacacggtcgctccgtttccccaccgcgccccctccctcccttcccccacccactgctggagcgcagtggcacgctcacttcagcctcaatcttccaggctcaagccatcctcccacttcagtctcccaagtagctggaactacaggcacacgccactacgcccagctattttttaaattttttgtagagacagggtctcctatgttgcccaggctggtcttgaactcctggcctcaagcaatcctcctgcctcagcctcccaaagtgttgggattacaggcgtgagccaccatgcccagcccactcactgcttttcttttttttttttccttttttttttttttggaagacagagtctcgctctgtcctccaggctgaagtgcggtggcgcgatcttggctcactgcaacctccatctcccaggttcaagccattcttgtgcctcagcctccagagtagctgggatcacagggacgtgccaccatgcccagctaatttttgtgtttttagtagagacagagtttcacagcctgttacccaggctggtctcgaactccagatctcagaacccccacctcagcgtctcaaaatgctgggattacaggcgtgagccactactgccagcccactccctgctatttttagttctatttttatttttattttgagacggagtttcgctcttgttgcttaggctggatggagtgccaacgccccgtctcggctaactgcaacctccgcctcccagttcaagtgattctcctgcctcagcctcctgagtagctgtgattacaggcacctgccaccacgcccggctaatttttgtatttttagtagagacgaggtttcaccatgtcggtcaggctggtctcaaactccctacctcaggcaatccactcgcctcggcctcccaaagtgctgggattacaggcgtgagccaccgcgcccggcctttagttctatttttaaaaaatgtttagcaactgggacttgctagaccgagccaccattttttgtgagcagagcatgaggagcctgctccccttcaggccatgaagagagacagacccaacatctggagaacaaggtaccaaacagcccacaggatggctgtgatgcacccacaaatcccctcagagatgggcaaactgagactggctggaggtgggccagtaagtggggtgctgagttgggggccacccagtgggctgcaggaatggggccttggcccagagactggcttgggaaggggtggcatttaggaagctgtgaagccagggcaggggctaaggaagtacctgtcattgggcatggggcccccaaccctgcccagtctcaccttcatgtgcaggctcgagcccaggtacacggtgaagatggccacagcctgccaccagtggtagatggtgaagatgaagtcctgtctctccttgtcttcgtacaagattcccaggagtgctgcaggcaggcagtacagggcaggcaggggagaggtgtcacctggggcctggggctaccgagctaccatctacgaactttactaagccctgtatgggtcccagccccggaccagagagcgcctagaaagtgctgtgaggcggtcctggcctgccccctggtggagaccctggtcaccacactgctcacacgctaagcagaagtaggagcaggtgcctcgggctgtgtggatgcaggtgttcccgctccgcaccacatgcgtggcctcaaaagaagaaagctctgtgcttagtcatgtcctgtccccaacccaggtgtgcagtgccaagcttgcaggcgctgtttctcctcctcagccaggactagagagatcgaactgtttgcagctgccaactctgcaaatcaaacctgaagctaagcatggagaggggggattcctttccagtgagtcctcccagggtgggcaacaagagtaatggattgggagtcagaagatgcacgctcgttctcagggctgtaatgttggctctgtgggtgatttgggtacttaactccccagagctgcttttcccaatggtgagatgagcttatgcctattgtgtgctgtgttctgaagttctaaagtgagaaagtgggcatggcacctgccaaatcataggggccactattaacaccttcaccaggcactcaggatatgaacactcctgttttggggccctgcagggtgactttacccccacagtgctgctatgaagagacaaggaccccccggggttcaccggaggagatgggatatggagctgggcagaggggatgccaggaccagacagggcacaacatgggttcaagatacccaggctggactctgcccagaattggctatccttgggcaaaacggccaagagactgtggtgcagtatgaggctccagcccctgctacagacagagacacagagccagcctccgccctgccagcagcaggcatgacctcggctactccacacccccaaggatgacgttcaaaactgttcacagcttcggcccatcagaacagacactgacatggatgcccggcaggactgcccatgtgtgctagctgtgtttcactgcgtgtgcccatctgtggtcagggagcatcctggagctgaacatgggcccacccgctgccttctgcaaacagggccctgttccccagcagcccagacctggggcctggactctggtactgagcagactgggttggggctgcaggcctgctcctctctatacaaaggcccatgtctgtatctatgccatgggtgtacaacaggccacttgctcctaccacatgctccgtgaagcagagaccaaaacatctgctccaagtgtcatgaaaactatgccagggtaagccctgtcccctggtatgaaaagggagaatccctgatgtgtttttcacactgtccctaaggggtgtccacagagccccacacctgccccatgtagccacgagacttcacactgaccctccagtgttgatggggccctgtgcccgctctggggtattaacagaatgtccatggcatggaacccccatacctgtctccagggtgtccacaccctacccatctgtccccagtgtgtccataagacttcccttccacccccggagtgtccacaggaagccccacctgcctctgccatgtccacaggaccctatgtgaccatgggaccccatatctgtccctgggatgtctatgtctcgccaaccacccacagatagccataaagccccctgccccgcccccccccccccagtgcccacagctatactcactgctgagtccagtcttgttcagggcactgcccacaccccaaagggcagctgccacatagaggatccagctgtgttgcaggacccgaggcacaggggcccagaaaaagaggatgaaggtgagcagcaggtgcacccctgctccggccaccaggggcaccgggcgtggcagccacaggcccagcaggcccaggagtgaggcggctgaggcgcccaggctgtaagccacgaggaggtaagccagccgctccagccccaccgagcacacgccatagccctgcggggggacaaggggtgagtgttgaagtctggaacagcccagaccacagtctcagccctccccgcatcgcgggggtgcctcacccccctgcgatgggggtcctaagagccaggggggaagagggtctggctcttactccccgcatcgtggggggtgcctcacccccctgcgatgggggtcctaagagtcggggggaaaagaggggttggctcttactccccgcatcgcgggggggtgccttacccccctgcgatgggggtcctaagagccagggtggggagaggggccccccgcgatacggggagtaagagccaggtggggagaagggctggctcttactccccacaagaggtgttccttaggccacaccctgccctccctggactgcctgacctcgctccaaggctcaggggaaggttctgagggcaggtgtgaaaatgcttggaatgtccctagacaccgtgggctgtaccccacaaggaactaaacactctgtgggtgctatcccatttcgattcagagaagttaaaataacttgcccaaggtaaaggggggacgggggtaagagagggaagagaaagcaggagggggatatttgggatatacatgtacacacttacatatgtaattaaaaattattctttgtttacttgaattcaaatttacctggctatcttgtcttttgtcgggcaatcctttgcaggctgtacttaccaaggcgataccagtgcaggcaaagagcacctcgaagccgctgtagataaagaaaggcacgaggtggcgcaggcggtagtcacgcacgtgcttgaagggcagctggaagatgttgccccagcccacgctgcgcagatcgatctcctccgtgggccggtaagcggctccgcacaaacccagcacctgcgaacccattacttgaaggggcggccagccaggcccaggcctggcctccaggcttcagccccgcccttcagatgcaccacgtgcctgggccttgccccagctcggccccgcctcccaaaccagggccccgcccctgagacactcccacagacccaggtcttgccttatcccagctcaaggccccgcctctcagcacaaagccacgccaccacactccgaaagacggtggtcttgcctcccagcccaaggccccatcccctctctctcacatacacacacttcacaactcacattcagacaaatccatagacttcaaccttccttctcagccccgcgccagacctcagccccgccttccaggctagtccccgcccctcggacacacccacagacttcggccccgcgtcccagcactaggccccgcctgacacagccacggactgggccttgcctcccagctccatcgccaggctgcagcatgccaacgccttagttctgccgtccagtatcacttccagtttgagccacaccttccagccctcacccttggtcctgtccccaaccccctcacaggtctcagtcagtcttctaagatcttgtctccagctcgaaactgtggaccaagcctgttccctccttcccctggcctctggatgcccacgcctgcctcggaccacaggcctcagccccgcctccgagcctcatgcccgctctgcagcactcggccctagctccccaactcagatcgcgctcccaggcctacggcctgccccgaggccacaacccgacccaggccatgccatccgatccagaccctttctcgcagactcggtccccagaaccacactctgcttcactgactgtcctgcccccatcccgggccgcaccagcagcatggccaggaagccactgccatgagcacgctctccaccacaatgaggtttccgctccgcgggagcgtccgcagaaccgtcttgttgaagccgctgaggatcccgtggctgttggtgcctgggaagggtgggggtgagggcaccgtgagcagagagtagggcacacagtcaatccagccaccagggtggagccacgcaggccgcggaggagcggtggagggcgggagagtgagagcaagggcagagttccttcagagagcagtttggaggtttggaccactggggctgggtttggaccactggggctgggtgttccccgggaaaggggcatctttcccctgcttcccaccctatttccccaaggctcagtggacctcacatttccatgcacaccccctgcactgattgagctctgactgtttgcctggccccaagaaagatcccactggcagcctcagcccagatggtgccttctccaggcagtcttccccgcccacccactctcctggctgggtcagatgtcctaactacttactcctacagggccctgtgtcttgcccaccagagccgtggggcactgggctgccagccctgaatcctgtgagtgagggcccagtgtctgctggggaagtaagcaggctttgtggactcctccccaacccccaacaaggactaaccgcagctctgcacattgtacagcgtgtggttcaggtcatacaggtagtggttcaggaaataaatcatgggcagctgggcgcaggcgaagctcagctgcagaaacaagggcagttgggaccagactcaggcacagagccaggcaagggacacaggcatggtctggggaggggtccaggcacagccttgggggaacaggggccttcccagttctgggagtagtgtggttacagggccgcccaatgaggaagacctcctcctggccagcattgtggaaaagggcagatgagatctctatctctatggatgagcaagctggggtgggctcaagaaaggaagatgggcagcctgggcaacatagtaagatcctatctctacaaaaaataaaaaattagctgggtgtggtagcacacgcatatgatgccagctactcagaaggctgaggtaggaggatcacttgagcccagcagttcaaggttgcagtgagctgtgactgcactactgcactccagcctgggcaacagtgcaagaccctgcccccaacccccaccaaaaaaaaaagaaagaaagaaaaagaaatgaaggtggggcagatacagtggtgtgcgcatgtagtcccagctacttgggaggccaaggtgggaggatcactggagcccaggagttcaaagccatctgggcaacatagtgagaccaggcctcttaaaaataacaataataaaagaaagaaagtgggactagagggttgagactgtggatgggctccaatgcgtgggtctgcccctgccacccaacaatggcccacgtggcactcacatggaagaagctgtagaagatggcttggaagaccaggagatagggcgcgtgggagccccgcggaggccgctgcttcatcccctgcccatcctgctccttgtagtgggagtactcatggtacttctgcgccatcctggaccacaaaggagagaaggctctccccagcccgacctgtgccactcctgtgtgtcctgcacccagagctaggagcagaccagccccggtgtggggaaactgaggcccagagggcggaaggggcttcctgtggtcccccagccaaagttggcaataaagtggaggcttggccaggtctccagcctcctgccctgctgcccaccaggctcacctggtgatgtagttgcccatggaagcccaaagaggcacgatggccatgcccagggccacagccgagggcacaagcgtgtagtagcgctcccagtagttggtggagacaaagagggcgtagatgcccacagcgaggaacatcatccacttcgttccaaaaaacctgcggacagtgggagagatgctggcaccacaggcctgctggaccactgtggcctgaagccaaacggggccacaaccgcaggtcccagctcacagggctttgtgaggtagagagagtcgagggcactgagatggaatatcagatacacagacttgctgagtggcctcaggcaagctactgtgcctcagttttcccagctgtaatatgggcacggagcccaaaccacaggcctctcatcaccactgtgaggatggagagtgacccatgggtgtaaccagccctcatgcgtgttctgggctctctgattctcccattcccccttctcctcccaagctcatgcactgtgtctgtagggcccaggggcttgactcaggctgggagaagagaaaggaagaggccccactgctgggagcagcagagccagagtcccggcacccctgcctccagtccattgcttttatgaaccatggtggtcagtcaggaagtttccacctctctgggtctgggaaaaggtcacacagtgacaatagaaggggcttggtgagtgacaggatgagggctcaaccacccatggaggctgatcaggccaaaaaccactactggtatcttcaagttttctgtatttatgctccttaagtaaaaatgccagtaaaaatgtgcattcactgctggtgaggatgtggtttgaaagtggcacatataggccaggcacagtggctcacatctgtaattccagcactttaggaggtggaggtgggcagatcacctgaggtcagaagtttgagaccagcctggccaacatggtgaaaccccacctctactaaaaatacaaaaattagccgggtgtggtggtgcacacctgtaatcccatctacttgggaggctgaggcaggagaatcgcttgaacccaggaggtggaggttgccgtgagctgagatcgcgtcaccgcactccagcctgggcaacagcaagattgctcaaaaaaaaagtggcacatatagccagtggtcacacacactggcataaccctttgggaaagcagcctggtagttttggcagggggtgaacatgtggatttgagtccctctactggggttcaagccttcagtctgccagttactgcctgtgggacctgggcaagttgtttaacaccatggtttcttcatgtctaagactggagcagcttcctcaaattattgggaatgaaattgcgcttataaagtgcccagcacggccgggcgtggtggctcgtgcctgtaatcccagcactttaggaggtggaggtgggcagatcacctgaggtcagaagtttgagaccagcctggccaacatggtgaaaccccgtctttactaaaaatacaaaaaattagctgagcgtggtggcgggcgcctgtaatcccagctactcaggaggctgaggcaggaaaatcgcttgaacctgggaggcagaggttggagtgagccgagattgtgccattgcactccagcctggtgatagagtgagactccatttcaaaaaaaaagtaaaaataaaaataaataaataaaatagagtgtcgggcagacaggagacaagagttcactgctattagtagaagtgataggtttcaaaagccataaagccttttgtatggcttggacctagtaaagacattgttgaaaatgtatcctaggaaaaataattgtttaaaaaattgggggagtgctggatgtggtggctcacacctgtaatcccaacactttgtggggctggggcgggtgaatttgagactggcctgagcaacatagcaactccccatcgctacaaatactttaaaaatcagccagatgtgatggcgtgcgcctgtaggcccagctactcgggaggctgaggtgggaggattgcttgagcccagtgtgtgggggttgaggaggcagtgagctgtgttcgtgccactgcactctaacctgggtgacagagtgagactctgtctcaaataataataataataaaataaataaacacataatttaaaaaaaaaaaacaaggaaacagatgtaagcacagaaggaactgcagtgtccaattccaagccactgttcagtgccaccgtatctgcagaagatgctaccattgcaaagtcgtaactgtgaaggctgtagagtaggctaagatatgctcagtgaaaagaaggaagcaagctctgggcactgtggctcatgcctgtaatcccagcactttgggaggccaaggcaggagaatcacttgaggtcaggagtttaagaccagcctggtcaacatagtgaaaccccatctctactaaaagtacaaaaattaaccgggtggcaggcgcctgtaatcccagctactcagggtgctgaagtaggagaatcgcttgagcctgggaggcagaggttgcagtgagccgagatcacaccactgcactgcagtctaggtgacagagcaagtatctgtctcaaaaaaaaaaaagtaagcaagcaaaagcaaacatagcccgcttgcatacacacacacacacacacacacacacacacacacacgggcacgtccacacacgtgctctggggacaaggatgtgaatgtaatccatgcatgctggtgggacagcatgggtagccgatttcctggagggcttagatggggtttcttttttatgatttcagttattctaatcctgcctgtgcaacgggagatgttttaaattttcaaatttttgtttaaatggagttttctcttgttgttttgtttgtttgtttgttttaaagatgagggagctcaaattcacctaatttgtccactggtctccaggtcccatcagggagggcactgtggaccggtgatggggaggctgaaccacatacctccagggctcagatctgggggagagctctggggcacctgcccagccatgcctgtctgtgagaaacaccccctcagcaccagtcacagcgactgggccaggcatgggtgcctggactttgctgaccgatcagaaacccctaactctacagccccaaccctgaaggccacagtggctctgggaggcctccaaggaggccacgaggagggtgccacgtgaggcccaggcaagctgggagggagctcagcccgtgtgaatctgttgctggaaaccaaatgtgccctgaggcaaagttcctgtttccttccccaaatccgagtttcacccccttcactctcaggcttccgggtagaaaaaaacctctcccttgttccctcgccccacaaacaccccggcagatggacacctcctggcccgccggcctctgtacccctccgaaatgggagtaccgcagcatcccacaggagcagccgcgcccacctgatgagcacaggtgtgtagagcagggcggcgatgggagtcacgttgatgcccatcagcattttgctgtcgatgtcgggcagccccatgttgccatacttcacctcgcggtaggtctcgtcgtagtgcaggatcagctgcatctgcaggaggcctggggacaggacagagagcggcgtgcagggagcagcctagctttgggcgccaccgagcagaagacggcatgcaggcctcgcagggagctccaatcaccgaaggcattcccgctgacagcgcccctcaggacagcggggttcccgggctgcgccacgccttctgccagcccgcggccacttggccagctaagcccagacccccacccgccttgctccgccggcctccaattctgacggtggcaggtctgtccgggagcccggacccccgtcccccacccacaccgaggctctggctgggacccggggacgctgcgctacttgaccccccaaccccacccccgccgcggggggccgtggctgcagctgcgagggcagcggaggggaagtgagagcgggcgggaggcggcggcccgcggtttctgtttcccgggccgggctgggagcgggcggggcggccccgggtccccgagcggcacctacccaggtagacgccgtaggtgagcatgcccccggcgctggcagccagcacgttcttgagcacgcccaggcgcttgcggcggtagtagcggcgctcctcctcctcctcgttgtagttggggtacgcgcccaccagctcgtccagctgcgagccacgcacgccgctcgcacccgcgatcgcgccccgaacccgtgtcccccggtgcccgccgccccccggcccgccccgcccccgccggggggaccctggcccacaggggacgcccgcgcctcgcactccgggtccccgctcaccggggcctcgggcccgtccgggaccccgagcaggtcctcgtcgccctgcggccccgcagcccccgccatcgggtagagcggcggctccgcctccatggcccgaactactgcggactcgcggcggtcgccccggagtccctgcgaccgcccggccacttcctcccggcggccgggacctgcccccgccccgccctgtcccgccctgcgggccgcctcctccaggacacgtgtgtgtgtatgtgtgtgtgcgcgcgcgcgcgcgcgtgtgtgcaggggcctgcctgtgtgtgccctctggggtgtgagttcgaatccccactcagccacctcctggccctgtgactttaggaattaactccatttctttgtgcctcggtttcctccgtttcctcgacggtaaaacagaaatacatggcactacccccggggccatggcggaactattgagttaatgcaaagccttggaaaagtgccagggttgcctggctcccttaagctcccctcagggttgcctgggtcgtccccagccccacctccaagcctgctgttacagctcatcaaagagcactgcagggacagtagcgtcaccacctggaccccacctcccaccaccggacgctacagccagagcccacctcccatgtccccatcctgctccagtttgggctgtgcaaatgggagcttgagtgggtcctgggaggtggagattgtgatccccactgaactacatgggggaccctgccacaaccatgtagtggggcccagagccacctgcccccatcctgctgggcactggatcccgggctgcagcgggagcctgtggtggggccgacactccaaagcactggctaccaccgacctggctggagccacggggccacttttgaaaatatccagattctctcccctgggttccttctggtttgaatgctcttcctgctgcgcctcccaggtggcttccttcccactcagctctcagaacaagagaccatccctgcagagaatgcagtcccttcacttcccttctggttttccatgccctccctgtgcacccccctccacccactgctctttaggtacatcctctcccaaatgcagaggatggcattgggcacctactgagtgatcaatacttgtgactggatgggtgcatgagtgactggatgacaaacacctcccaccccgcaaggattgctgggaaggtggggggaggcgtgaatctgcagtggcttcaggcttccaggaggtagaactttctccaggtgacgatgcccaagtgcagatgtggggaacagacaggtggattcatgcaggtgggtggctggaagtgggagacaggaaaggagccgaagagagggcagggcccgaggcgcaggggcagggaggaggtgggagagtatggctatggcgggggccgttctcagatggcagacaccagcatcattacacagtatgatgagaaagtgcaattctcctgactcagccttgtgagtagctggaattacaggcgtgtgcccctacacccagctgatttttgtatttttagtagagatggggtttcaccatattggcccaggctggtctcgaactcctgacctcaagtgatgtacccgccttagcccccaaagtgctgggagtgggccccccgagcttctcaatttccctgagggaccccaaacttctggggcctggtgcaatctcttcctccccttgttcctctgggcctgggggttgtggcggttgctatggttgcccatcctgggctcttccatcacctgtgctgtaccaccaattccctgcactcaatgtctcctactcaaaacacctggagagggtcgggcgctgtggctcacgcctgcaatcccagcactttggctggccaaggaggatcacttgagctcaggagttcaagaccagcctcaacaaagtgagacaaacccccccccccaacccatctctacaaaaaatacaaaaactagcctggtgtgatggtggacacctgtagccccagctactcaggaggctgaggtgggagaattgcttgagcccaggaggatgaggctgcagtgagctgagattgtgccactgcattccagcgtgggtgacagagtgagacctctcaaacaaacaaacaaacaaaaaacaaaaaaaacaaaaaacagccctggaggcactaaaccctgactgatacacctcctctctccagaaaggatttttttttttaggtggtttatggagctgctcttggggagcctggagactatctaagaggctgatagggtggcccagataaacacaccagggtgacctgcgggacagagatctgagcagggccagcacctccaccaacccatccaggttgcaacagtgcacagtcacatccccaggaaggggtggccagatccccccgtgctcactgtttgccaatgcttttctctataataagcctttactttcagttctcattatgaaaataatcgatgttccttgcagaaaagcaagcagaagagaataaatattgctctcaactggaactccctgaaacaacctcttggaatattgttgccccgcattgcactgacacaggagcgtgctgggcagcccacgtgattcccttcacaccacttccctggcatggatgtgattccacaatattttaaacattaaagccaatggggatgatgatcactgagtctggctcacaggatggtgggaggtccccaggttggggtgtgccaaaggctctgcccagtgcctggcacagcaaatgcccaggtggctgctgctttccactgagacttgaggctcctgagagttggtggcaaagggctcacccagagctgaagactccagcccattcctgtgcgagggctccaggcaccttggaagcaccgtgggccggggagccaggccaggctggttgtggatccccatgagtccttgtcactgtgtggcccagctggaaagcatggtcaataatgtctgggaattgtgaaaattgtgtgaagtgtctgcacacagtaggtgctcagtaaaggtttgttgagtgcgtaaatgaacaagtgacccgcattcaccgttgcccgtgagttctgactgtgtcctgggccctgggcccctacagcctctaactttgcctcttcaaggagccagggtgggtccagccttcaagactgccagggagggggtgggaggcagggccagggcctcagggccaaggcctggggcagccacttcctcaggagggcaaggagaggggcaggaggacattcacatgctctgagcgcctactgagaaccaggtgccctgtcggtgccttcaggtcggctctcgtttcaccctcgcagtagccatgtgaggcaggcagagtcagcccccattttacagctggggaaactgaggcccagtgaggggacgtttcttttcaaggtcactcgtgggcagatgaggcagtgagatgctcttgggcaggtctgaggccctgtgagccaggctcaggggcgtgtttctgagaagtgagggaatgaatgaatgaattatgaatggatgaatgattccacctgatgccatgctcatgccctgcccacactcctgtcctagagtctggaaggtagctctcagacccttccagagggggccgggcacttggaatggtcacagttccgggcccacgtgcatggaataacttgtttcagcctcacaatcacttatgtcccattttacagatgggaaggcagaggcacggggggttaagacactaacctaggtcacacaggtaagtgacaggaccaggatttgagcccagacctcacacttaacgccctccatgccaggtgctgagatccatgcctgccgaaccctctcattcacccacagatgcccccgggactgtagtcagccccattctcacatgggaacactgaggcccaaagaggcgaagcgtcagcccagcaaggaggaggcagggcaggcggggccgcagctgtctggcccggagccctgagcaacccctccacccactccccctggctggcctgggccttggcagacctcaccccagagctggctccaaaagtgagtcctcctggtgccctacccagagggctccccatttaccctgggctcctcaacaaagatgggactcccaggccctactgagcctctggagctttgaggagtagtgaggggcacccaacccagagtggggagggcccagccctcctgggaggtgtgtggcctcccttggggggagcctcactcccagggaaggctaggagttctgtcccgggaggacaggcctcttcgggggcctcctcccaggttgctcctgcattcatgacaagttcggcccctgtgagttgggggaaattcttcaacagctccctggccagggaggggaccctcgggatcctgaaacacccctcccacctgccagtacccgccaagatgggtccctgatttgctgtgtggccttagaccagtggctgccctctctgggcctcactcccagctgagacctacaggctcagcccctgcccagccctgcctggcacccgctcaatctggctgagctccagagaatggcagggctgggctgtcacatgctgagccacgtgactggcagtggctgggggctccatcccacacagaggacaggggctctgcagtccttcacccccaccctaactatctaatcacgggccaccggtgtgggcatggtccagaagacctcaccgccctcccaggtaggcagggagctggcgggtggggggggccatgatgagcacctcccaggtgccacgttggcccagaggccccggggccgggagctacggaggcccagggcaccagggagatggtagcagcggcaggcccaggaaggggcatagaggaggctcttcctccacacctgtcaccctgtcccctgcctgtccacacccacagcagcttgcacatcatccccacagcacgctggctctgacaggtgtatccggggcgggctgggggcaggcagggacaggcttaggcacagctgcctgtgccgaacttgaggaagatcgggactacaggaaccaccaaggcgacacgtggcatcatgaccacggtcctaagcagagaggcaggcactcctcctgggaggcagaggggacatccgaaacgggtgcagccccagctctggagcaagaagctctgccacacacacgccccatgttcacatcccaccccctctctgcccccacttcctcgtttgtaaaatgttagatctgcagaaagacaggctctatgaatggggcggcccatggggtggtgtggaggaacacggaagcacagggcgctgggagaggagcaggcatgaggtatggtccctaagatggtatttctagactccagccacctttgggtctgacctctttgttttgcagaaggggaaactgagtcttgggtagggtgtagcaagacaagccacagacaaaacacctcagacactggattaaagaaggaagaggtttattcagctgggagcatcagcagacttgcgtcaagagccgagctccctgaaaaagacattcttggcctttttaaaggcttacaactttaaggggtccacgtgaaagggtcgtgataaatcgagcaagctcggggaacgtgaccgggggctgcatgcgtcagctaacagaacagaaagttttgcagtgctttctcatacaatgtctggaatttacagataacacaagtagtttaggtcaggggttgatattattatcacttttttttaactaccagggccaggtggtggcgccaaggtcttctggctatttctcttacttctgtttttttctaactttttgccttctctctttcctcctgtcttgtaaaccaggcaaggtggtaggaggagggcagcaggagtagtagtggtcttattccttaggggaggcattgagggaaggctgggagtggggggtcgagacttccttgctattctgggccataacattccacataatattataatagaatataattaatacaataatagttccccaccccacaccgggattcccagggcccactgccccactcctcctcctcaggctggccctcagctcagtgctcagccctgctgcacagcctctcctcctcctcctcaggctgcccctcagctcggagctcagccctgctgtgtggctctagcctggcgccctctgggcgttgacttcttctctgtggtctgggaggagatgtcgaggcccccgagggaggcggtggtgaaatcttggcttgcagcctccagcccgcccagagccagagtcaggcacgaggctagggcaactccgccccacccctcccccggggactggccctgcgttggacatttcttaacagcagggccaccaggcagagcgggacagccaggaggaagggcagcttggcagagcctcaggtagagtatcccggggaggctggggctgtagtgggccagcagtcgggccagagtccagctcagcaactccgggttacaggcagcccaggcgggcctagccaccggcagctgcactcagaggccactgtgtcctggctgagctcatctgcctgcctgctgggggagaaagcggaaggaggagaggcagatctggggagtggcagcgaggtcccgggcacccccctggccagcaggcacccttccgttgtccgagctgggttgccaccgcctccttttcctgggattcccggacaccctccaagggaaccaagggaacagctctgggtccagctgccccaggaaggactgtgcgccccttccccacaggggtcaagtatcccttccagcaacagccgtttcctgggcaccagcctgcatgcccagtgctgatgcagggatgtggccatgaatgactctgggaaagaatcattcttagcaatggactttgtcagggtccaagaaaggagtggccagccagccccgccccgcctgcaggaggcacttctcatcccgggaactgtgccccatcagggagccgaggctgttcagcctctttgtgacccggggctgggttggcccgagccaccaatgaggggatacgctggtccctggctccccaagggaggggctgctgagctttgggaggcctcatgaaaatccagcttaaggccatcaaaagacaaaatgacaacacatttagttatagatcaaattggcttctattcatgattcgtgaatccggacagcctccattctacaaaatggagtgagagctcccaccaggcagtggcagagcagggggttcataaggcagaaaggaggaaacagaaaaataggaaacaccaaaccgcctaataccggatcgctgcagactgcttttttctaagcggactgcttttttctaaggggtaaggcagaggggacctgatgatgccggctcaggtggactggaatctcctgcttcccggagaaactggtctgtggttttgggctctgtctgcttccttaaagcttcggtttgatgatgtggcatttggcatgagtgcctccattttggtttggtctggtctgttggggcctagtacaggagctcagttcaaaatcacagcctctcatcatgtttgtttaatgaagctacactgcaggagatcagaatcggagaccctgcggtattgggcctgtgggtcccctgaagttggcctagtgatccccgccttctggctgccctgatgggggtcccccaggccctctacccaccatgttcagtccctctgtcaccacatccctgtcctcagttgggtctcagggtgatgtccttgtctccccaacacccaccttggatcaaggccccttcaggcccctgccccaggggtctcctccctgagccctcctctggtacatccgtcctccatggatactgagcacttcccggggtcccagtgcttgaattctcccgacagtggtatgggtgccacaggcagtgcccaattttacagatgggaaacgtgaatacaaagaggtcaagcaacctgcccaaggtctccccactcacacatgtggttgctgcagtttaaacccaggtcattgggcccccagaccatgccatgctgggaggatgctcttagaaggcccatggtgtagatgaggaaactgaggcaggaagaatgagagaacgggcagagcctccgtttccctggaatccaacccacttgataggccagggtgtgaacgagcagggagtccctgcccagggacggtccctgctgtgaggttgggggcagcggctcggccagccattcactccctgtgatatgtcagccccgttcctccccactctgttcccggagcctgtgggcacccacagcgagcacccaggctggcatagtgcccagcacatgggcacctgagtattgtttttagaggcccgtggccttgagaggaagtggctggtcctgccctggcccccaggccagaggaaacagccgctatcttcatcaccaaatgatgtggcaactcccccccaccccagaagctgcaggtctgggccaaatgcacctcaacctgtgatggggggccacgccccagagacccttgggcccatcagcccctggacctcagtggctcagccgcaggaggcaagaggcagtctcagaccccacaacctaagcagtgtggggagtggcagcaatagtgaggagggaggccgaggaaatggaatccaaacagcaagagacctcccctcaccggtcacccctcccacagctggcctaccggagtccacccagccttgggtctgccgtccaggccccagcccagtgtcccttcccccaaggacttggctgcccatccccaggggactgtgagggaggtgggagctgaggtggatagccttctgctcttctggatttgggttttccaatgtgaggagctgggtggtatcaggcaagctctggccctctctgagcctcagcctccatctccttcagtggggtgaatagtggtccctcagtgggcggccgtggtggtgaaatgagcgagggcaggcatggggatcacactccttacaacctcacactgtgggatgagtgccgcgggggtgggcttgggggaccccagcccagtgcctgattcaggagttccctattctgtgtgtccacaatggctgcccagcaccctcgggagataacaggcccaggatccccccaatctcaggcagaaggcggccttggcttctccgcttgccagggtcctgccctgggcactccctgggggcctcagtccagagtgagtgacccgtaggggcaatgccagggctggttgccctgtgggagagatgtgtcctgtggccctggtgagttggtttcagcgttgctaggagggttgctggaatgttccctgcagaactccatcccccacagagctcccggcccacagtccaccattcacgttacgtgccttgcatttttgtggtttctgcagagattcttacaaagggtgagagaggcacaggcgtggtttgcctttgaccactggcagaagtctgaaggtgagagtagaatggagaaggacccaggagagtgcggagttgagggagataaatatttgcaggctacttagcaaaacacccagagctgacctttgtcgagtactttctgtgggcacaacagcaaatgttttatgcagcgtgatgtcatttaatcctcacaatgacaccaggtgccattagcatccccatttcacagatgaggaaaccgaggcagagaaggtgagtgatttgcccaaggtcccacaaccagtaagaggcagagcccggagacaggcctgatggtggctcgagaggctcgttcttggctcctgggtctcagtcctgctcccgtgacgagccatcccctatggggaccatggtgcctgtcctgtgtgcgggccactgcccagcttctcccaatcagagcaggaagatggtgggttcagcctggccccacaatcactccagctgagggctggcctggggctcctgaccaggctctcagtagcacactggtccagcagggccatcctgcagaccggagcaggtcccgccctcaaggtggccacttaacaatcacccacagccttgcgctcaccgatgctgggccctgggctcagaaccgactgtgtggtctcatcattagctggcaggtgccatcattacaccggtaacatgagaggcttcaagcactaggtctcaaataagtaggcacagaggggcctgcctcccagtctaatgagggggaaataagggagatgtggacagggttgggaggtgggtagagtgtaaccagacatttatcacatggcacaactcagaacgctggggagcagagtcaaggggccactgtgacagtggatgagggcataatctgggtgggctgcctggaggaagcatcagccaagctgagatctggaggaaagggactcggagagggaaggaggaaagggtcaccacgggtccttggcaccaggccgaggaacgagtgcgtcagagtgctcctccgatgaacttcaagtaaacaggcagggctcgggggaatgtctaggcccctaccctgcctgccagctctggctggcaccagcacggaggcaggaacgccctctcccccgccctgatcctctcccccacagctgtttctgcctcccagcaccacagccccggcagggtgggcagcagggcctccaggaggcccgaggtgttctccccctcttcctgaggaagctgaggcacagggagaagaggctattgcccactggcctggcctccctgggcagtgcccccaggctggggacagaggaagacggagaattctgtgtctggagtgctccaaggtggtggccatggtggcagtgagtcaccccctctactcatcaagctcctgcttacaccattcagactggcaggggtgaggctgccccgcctccaggaggggcatcagggcagggcagaggccatggcttggggttaatttctgtgcggcaggaagaagcatggcgctctgcctgcctgctcaccctcgggggctgtggtggagcagctgtccccaagcccacacccagtcctgcagccgcctccaggtccatggcagaggggagtggtgcgagggtcttcatgtgtgtctgggagtgctcactgttgggtgaaaggggttgcaggcagcctcagtccctgtggggtcatctgagtgggtccctgtgtgtgtataaggtagaggtgtctgcaagcccctgtgggtgcaggcaggtcaggggtgcccagaccctggggcggctgggtggtgcccatgaaggaggggcagccctggccacccagttcatgccaccccatctggcaggatggacccccttggggacacgctgcggcgactgcgggaggccttccacgcggggcgcacgcggccagctgagttccgggctgcgcagctccaaggcctgggccgcttcctgcaagaaaacaagcagcttctgcacgacgcactggcccaggacctgcacaaggtgggctggggttgggggtatgagagggtgcactggggcaggggggcatggagggcagctgggacagcaggggatgaagacacctgcgccctccatgaagcggggctaaaagcagctcctcccctaggccagagccacccttgcacattcatccagtcacttatttctgtattcatgcagcaactatttgctgagcacctactatgtgccaggtactgttctaggctctggggatatagcagagaataaaacacagttcccatgcctacgaagatgaccttctatcggagacaataaaacagcaaataaataattgcacagcaaggccgggcatggtggctcacacctgtagtcccagcactttgggaggccgaggtgggcggatcgcttgaggccaggagttcaagaccatcctggccaacatggcgaaaccccgtctctactaacaatacaaaaattagctggatgtggtggtgggcacctgtaatcccagctactcaggaggctgaggcatgagaatcgcttgaacctgggaggtggaggttgcagtgagccaaggtcacaccactgcactccagcttgggcaacacagtgagactccatctcaaaaataataataaagataataattacacagcatattgggttgaaatatgtgccctggagacacacccagggtgaaggggagagagggggccaggatcagggtgctgttgtatatgtgggggtcagggaaggtttctctgagaagggggctttagagcagagacgtgaagatggaggggaggctccccatggatgctggggagatggcagcgggcacagcacgtgcaaaggccctgaggcaggaggtgctgggtgtttctgcttgaggagcagcaaggaggccagcatagctgtcgggggtgggagaggaagaaacagcaaagatgaggtctggggtatgggccacactatgtagggcctcggaggccgtgaggccttggccttctctctgggtacagcaggcatcatggcctctgtctagaccctgaaggcttggggcctcagcccctcccaatcccagtggcagccaaggcagaaccccaagaaacacacttcccccaacccctcacccatcagggcccatgcacctgcctgcccctgcctcaggacacctgcccctgcctcaggacaccacctgcccctgcctcagcacatctgccccaggggctgcccccggctcctattctctggacaaaatatctcctccctttgccttgaaggctgtagtgttcagaccttcccccagcccattgggctccctggggactgactcccccgccaccactgagcttctgccaccggccgcctgccggccttcatgagacttgacctgacgtctgtctggtcccttttctcccttcggctctgattccacctcctgccttcccatcccagctgcaggagcggggccctacaaaggcagcagtagcccagaacattcaacctggtccctccctctggacctggtcacccccctgtccccaccctcagcaggcagcatctgcccagcgtcacgtgcaccctctcagttaaccctttggtgaatctggttgggcaaccacacccagtggcccccagaagaggctcagagagagtgtgttcttgcccaagggcatgcagccaggaagagcagagccagagtttgaacctggctcaaaatagcccagtctcccaaagtcaggtcccaggtgacctaggaggtgtggcgggcaggccaccaggctcatggggccagagcacaggctgtgggaaagtccgtgtggaaggcaccttcccccagcctcagtggctaggaggtgccagtgggcgtggcgtcttcctccctcttggggctcagctgtagccctggccttgcccctggttcgctgagtgacctcaggcagggcatctccttctctgggcttcgctggtcctctggcccatccagcaccccactggcccgtccccctctgccctgacccgggagagcctgcaccccataacctcaggcgctgcctcagccagggagccagcctggccccagtgtccctgacctgttctccagcggcctgcagcctgctgcctggctggtctctcctcccttggggcgcagagggcagggagcactggctagccgagagcaggacaatgtccctattgattcgggtctcctcactcctgcttagaagcctgacagtggccctggcccctgggctgtgggaactgacagcatttacctaggggtggctgtgcctgtgtctcctgtggaccaatctccaccctgctctttgggagactgaggtgggaggattgtttgaggccaggagttcaagacctacctaggcaacacagcaaggcactctgcaaaaaatcaaaacaaactttttttgaaattaaaaaaaaacaaaaccctaagtcagatcccatccctgctcttctcaggagtccttgcctggctgcctggccccctcaccttgcccactctgcttcttgctaaacaggagcagagcaagcgcacagccacctcggggcctttgcagccgccagggcctctgcccaaagtatgccgcctcccagtacccacgacttgcttgttccttgacttcaggtcactgctccaatgtgaccgccgcctggagacctgcactgaccgctttgtaaaaacagcacacacacacatgctcatgtggatgtatacatgtgcacacctgtgcacgcccacagccacacgctccagcagtctccacccccaccctgctccatgatttccctagcacagccacgtcctaatggagccgtcagcgttctcactttcacatggaacgactgccccctgcaaggtcggcctcagggccggtccctctgtttggcacagagacagcacctcacacaggaagcacgcactgaacatggagtgagtgagtgaacgaatgaatgaaaatgaatgaatgagttgtggaagcaggccctgcctggaggaggctgtgccctcctgccaactctgggaatcctggcccaccctgaccccacccacttcctgcagtcagccttcgagtcggaggtgtctgaggttgccatcagccagggcgaggtcaccctggccctcaggaactccgggcctggatgaaggacgagcgtgtgcccaagaacctggtgagccggccgggctgaggcgggcagggggctcaggggatatttgctcccacagggtggcccctctgggtgggagctggctgctgaggggccggggtgctgagcacttaatttcatccccggctcccggcccaggccacgcagctggactccgccttcatccggaaggagccctttggcctggtcctcatcattgcgccctggaactatccgctgaacctgacgctggtgcccctcgtgggagccctcgctgcaggtgagagctgggcctgccccttccggtcacccttctccgctcgaggcctcagggccacccatggatcccaggaggacatgggagaactggcccaggtggcaaagaggactgtctggtccaccgtccccgggctgtgtggccctgggcccgtcatgttacctctctgaaccaggttctgcatctgaaagtgggtgaggctgatgcctgccctgcaggtgtgtggagaccaggagctggctacgcctcctccagctctctccctgcactgccctgcagggaactgtgtggtgctgaagccatcggagattagcaagaacgtcgagaagatcctggccgaggtgctgccccaatacgtggaccaggtgagcagggctgccgggcaggtagagcgggaacaggcaaggctcaagggctgggcagcccctggcatggaagggcctgtcagtcagacccgagtccccacctcaatcctgcctcttctgagttgtgtaaacttgaccaagtcaccgcccctgtcagcctcagtttccctctgaggagcagcgagggcagcctgttgcccaggggttccgtgtctgcctccacctggccctggcatcagcccctccagcgccagctggactccaagctgggcctgccaatgccagccaaccttggggagctcccttctccccactttgcctccacccaaccctcctagagccctggctgggtcaggccaggcggggtggaggcagggcagggtccaggcagggcgggctgctcccttgtgttctcggagctggggtcccagaaggagcctcacccatcccgccttgcagagctgctttgctgtggtgctgggcgggccccaggagacggggcagctgctagagcacaggttcgactacatcttcttcacaggtgaggccgggacgagggtcgggacaggctggggtcggggaggacagctgctcaggggtcctgtccctaactctgggagtccacagggagactgaattctcctctctctctctctctggaccaggctgggagcagtcctggacccccaggaccccttaggaagggatggagtcccatgtccagggccagcccactgtgccaaccacagcgtcaggaaccatagcctctgcccccactgtccccagaccctcatacgtgaccctgctgccccccaggctcttagacaccaccctactggtgcccacagccctctctgcaggcagatgagggactgggcctcagtgtcctgcccagggtcaccctgctggccaggatggggacaggctggaatgtgcacacaagcccttggagaaatccacgccagaggtcactttttttttctttttttttgagacagagtcttgctctgtcacccaggcagtggcacaatcttggcacaatcttggctcactgcaacctctgcgcctcctgggttcaagtgatgctcatgcctcagcttcccaagtagctggggtgacaggcatgtaccaccacgcccggctaattttttgtatttttagtaaagacagggtctcactctgttgctcaggctggtctcgaactcttggcctcaaccagtcctcctgccttggtctcctaaagtgcagggatcacaggcatgagccaccacacccggcttcgagtttttgagctagggaggggcagagggagcgagaggaagacagtggtgctggcaggcgagtctgcgccttacaggtcgaggcagtcgtggggaagggcctggcaggattgacctggccgcctcccagcaaaggcaaaggagccctggaaggaaccacagagcccaggaagcactgtgccaggatggggcaggggtgagagtagagaaggcacagtggctcctgccggctttaatccttgaccacaagggggagaaatgccagggccatccccacagacgcagcagcgtggtccccgagtcaggtctggagaggaggccttgaggcccagacagggctagggcagagaaggctgtgtgcatgcggagactgctgggcccctggaggccagcacagaggagaggtgaggccaagccaggcaggacatggggacgcctgcatcagcctgggacagtccacctcaagggtcagaaaaaaagggctgggcaggtggcagaacttccaggtttaggtttagagaagagagacctgaatgccgtagacagagctggactccatccttgggtgataagggatccccgaagtttccaaaggagatgggtggggaggggttccatgcagcattttgcaaagagtcccctgcagggtcagccagggtcacaagcagaggcgggaggagccaaggggtttggctcagcagggggaccctgggggccgatagcagccgtgcaccattccctcctgagactctgtgcttaggggctggtcctgatgaaggatgagcagggccctgggctgcagggtggcagtgaggaacaaggaaaggccaggcgagggctgctgcccgctgactccaccacctctccagggaggagcggggccgtgggctgggccatcccgcctggtccaggtcactgaacggccactctggtttccttccatgcccagggagccctcgtgtgggcaagattgttatgactgctgccgccaagcacctgacacctgtcaccctggagctggggggcaagaacccttgctacgtggacgacaactgcgacccccagaccgtggccaaccgcgtggcctggttccgctacttcaacgccggccagacctgcgtggcccccgactacgtcctatgcagccctgagatgcaggagaggctgctgcctgccctgcagagcaccatcacccgtttctatggcgacgacccccagagctccccaaacctgggccgcatcatcaaccagaaacagttccagcggctgcgggcattgctgggctgcggcgtgtggccattgggggccagagcgatgagagcgatcgctacatcggtgagtcctgctgcccctaccacagcccacctgggccaagacccctcctcactggagggcccaaggctgggccacaactctggacccgcgcctgaaacctggccccactgccagagcccggccttgagccacagctccagtgccatgattccgtctctgtgcttctaagtctgtggccctatgaggccaaactctggtccctcaccttggattcgctgagctcagatcccagggctccagggctcagcgtgctaagatgaactcccatcccaccactggctatcctgaaaggctgtaacctcagattctccgagcccacaatccccaggttctaaactccgagagtcccgtcctgagcccccagtctcctgggccgtacggctcagcagctcatgggacactgcggcgccaacattctgggacgctgttgcctcatgaactccaagggttctaagatcccatcacccctgactgtgagaccaaggtcgggggattctctgtgtcccacaggccctgagcaggctggggaagctctagagtcccttctggggggctgtggggagactttcttccctaaacactccaaagcctgaagccttgggaagtcagaccttgggatcctggcctagagccctggcctgtggccctgtccccacctctacccccaccctgggggcggtcctgactgtggccccagggctgagctgtctctggtgcctgcagcccccacggtgctggtggatgtgcaggagatggagcctgtgatgcaggaggagatcttcgggcccatcctgcccatcgtgaacgtgcagagcttggacgaggccatcgagttcatcaaccggcgggagaagcccctggccctgtacgccttctccaacagcagccaggtgggggtgcggccgggctgggcagggtcaggagcccgcagtgggcagcacaagtggtggcagcagggggggcaccaaaatccagtggcttcaggactttgggatggtggacctcttggctctgtctctgcccactctcctggaagcagctgagcctcacccaccccaaccctgtccccagtctgggccccactctcctaggccttcagtgggcagcttcctggggtatgggccttctctagggtccagtgtttcctctaggtcagcccctgcctttgtccttcttacacatcggggcctggtggccacatgacccctcaagcctggctctgaaggcacaggcaacgtgtcggggatgacccaaaggtgcaggtccaagaatgagccctgatcccctacccctgcttaagctgcagaggcagcctgggaggcccaaggccagagtcctcagattaaaaaacaccaagaggtaccagcagtccctacccaccccgcccccttccccggccctcagccagttcctcgattccctccacttgaacttttttttttttttttttgagacagagtctcactctgtcacccaggctggagtgcagtagcacagtcttggctcactgcaacctctgcctcccgggttcaagcgattctcctgcctcaacctcctgtgtagctgggattacaggcgtgtgccactatgcccggctaattctttgtatttttagtagagatggggttttgccacattggtcaggctagtcttgaactgctgacctcaggtgatccacctgcctcggcctcccaaagtgctgggattacagggatgagccaccgtgcccggccacttgaactttttttaaataaactttgtattgggaaatacttttagatttacagaaaagttgccaaaatggtacagagagttcccatgtaccccacacctaatttcccccatttaatggtgcttagatgggtcaaaactaaaaaagtgatggcagggctgggcgcggtggctcacacctgtaatctcagcactttgggaggccaaggtgggaggattgcttgagctcatgagtttgagaccagcgctggcaatatagcaaaaccccgtctctatgaaacatttttttaagattagttgcgcatagtggcgcacacctgtaatgccagctgctcgggaggctgaggtggaaggatctcctgacccataaaaaaaaaaaaaaagtgacagcagtgctttactattaactacactctagactttatttggattttgctgtttttccactgacatcctctttcggccccaggatccaagccagggtcccaccttgcattaataaccctctcagcttaaggagtgctggacaggtctcctgtagaacatccccagcctcaggtcatctggtgtatttctcatgattaaagaaaggttactggttttaggagagaatcccacagaggtgagcctgcctctcacaccacatctggggcacctgagatgcacacgtggctagtgagtggaaccttcactaccgggtcaggacggtatctgccagggtttccctgggaagctactattgtttgtttctttattatttggaagcaagtctctaagcctaccccaccctcaccaggtggaggtaattaagctgtatgctgctctatcatattgttagttattatctagttattttatacattcttttcttattccatttgtggtttggtggaattttgttgtattgccatttgatacctttctcttcctcctttgtatgattgttttatagggcctgtgagttttgtacttttgtgtgtattatggcaaataccaacttgtttttatgttaagactcctttgagcatttcttgcaggactgatctagtagtgataaattcccccagcctttgcttgtctgggaaaggctttatttcttcatctacgaagcatagtcttagctggataccgtattcttggctaacagcagtatctacatctatttcctggaattctgtaagaaagattcatctcttgaattgtttatttaggtcactacggactcaggtatatttatttgactccaggggctgtaatccaaggtcgtgtggtttgtctgaggctcgggctcagaagcccatgtaagatgtcccagcctcttgggttgtgaccacctccttcccctctggtgctacaagcagctccaggctcatcttgtatctcccctgctccaactccagaagcagccattccttcaaggagccctgcttcatctggatactttcacctttagaaaactctacagaggttttttgacagtggagtcatctggcttcaaacttttctgaccacccagaactgatcccaggacacacagtcacacctaagacacaagtcatgcacaaggtggcttgcccgtactacctgggacgccctctgctgccttctgctccatctcctccatctgctgccactgccattgtgggtaatgctggtctcatgccatgaagtgacgtctgaatccactgggggcagtccgctttccccacatcagacaagccctgacccagctgtgatcagaggttcacggtgattgcaactaaatatactgaagtttttgtgcagcaactatttagtgtctaccaatctttttttcctttcagtcttcaaataagtctacagattgaggaagaaggtccttctcaaggaccttcaagcaagggccaagcttctgtttctaaagtgcaaatctgaccacatcattatgttttcatgtccctgtgttcacaccacacagctcttcagcctccactctgtctgcagtgccctctttgcctgaacaacttctgtccctcccagtccctccactcagcaggcacatgacacccctctcctgggatgcctccctactgtccagtactgccctgctgccactacaccctccatgtccccaagcaacactaggtttcctgcccctacccccagccctaagagtctgtgccatcagcatggaccacacatgagcagatgtccaggaaacatgtcccaagttggaagcttcatgaggagctgctacacaaccccctgccccacctgtaccatcacaggcccttcagctgacatggtggcctcagaccctttctgaggcaagatcagtgtcacagagtccagcatggaacaggctctgggtcctgaggatcctgatggggctcaaggcagcctcacgcacatcctgttctctcccaggtggtcaagcgggtgctgacccagaccagcagcgggggcttctgtgggaacgacggcttcatgcacatgaccctggccagcctgccttttggaggagtgggtaggtgcctgctaccctgcccttctgttaccatttggtcaaattgcaatagtgttacctgcatacatttctgccaaagcaccccagccccacctcaatgtagagggacaggcaaggaggcctcaccccagaacccgcatcctgctccccaccccagagggtctgagtccaatctgggcaacacagtaagaccccatctcaaaaaaaagtctgtggtggaaccttctagaccatctctgcacagacacacaatttagtgaatttttaaaaataccacacaactatgatcacactgcccactgcgatgctatttgctcttctccccaacagcatgacctggtgtctgcccctcagcagcaatgccgccggtgtcctttactccagggcagctgctcctctaaccccatcccccctccagctctcagtacaacacctccccaccctgagaggcccggatgagtgccaatcctccaccccccagagcagccccgatgccactgcagagtcctggcctctgagtcaggaagcctcagagatggtcctagcaacacgctgaaggccctgtggcccaggtgacatctcccctttctgagcccacttcctcctcagagaacagtaggccccgagcaggtgacaggcagtcccgccacctgtccacactcagcaccacagtgaacgatggcagggccaggcaagctgcctcaggtgggtccatgcccttcctggagggcagccaggggcacaacagtgcctgtgctgctgtcctggctcggctcgagtttgggcggctgcccccgaccccacctagctgcctccccagccccagccccagcctcctcaacccgcctccctgccctggaggagagtcggggctgtctgtgggcacatctgaccctgctgctccctcaagaaagcctcccccagctcccaggcccccgagctgacccttcttggtggccgtggccccaccccggcttccccacctgctgctcccacagcctgagctctgcccaggtccctaacacaccgcatggcacccacctctaaggctccccaagcctgggtccctcttgcccccacccactctcttcgtcttattaactgcatatccttggagctcactcactgcaggaagccccccagccaaccccactccacccaggctgtgctctgaacgccctggcctggggcctcgtctgcctcccaacctagacgctgaggagagttcactgcacatagcacctactgggtccaggggtctcaacatcccctcaatccccaccacaaccttaggagggaggtacccttgtcaccccacgacagaggagactgaggcacagtccaaggtgacatggattgtttgcagcagggccagagtttaacccccggcagtctgactctggaatccatgcccttgaccaccacccgcctatcttgccctggcatctggcatccccagggcttactgagctggtgccaagctcggggccaagccctttacacacagtgcctcatgatcagcccactggacagatggggaaactgaggctcagaggggagaagtagcccgcctaggccccactgtctgtgactaggagacccccagcgcctgaccacctgtgttctgtgccactgtacaggtgccagtgggatgggccggtaccatggcaagttctccttcgacaccttctcccaccatcgcgcctgcctcctgcgcagcccggggatggagaagctcaacgccctccgctacccgccgcaatcgccgcgccgcctgaggatgctgctggtggccatggaggccaaggctgcagctgcacactgctctgagcccttccccaggcccaggctgtagaccaccatgacagctgtcgcctgcggctggtggagacggggcctgggctcccgggcccgaggaggaaaaggattgccaaggctccagggcacccctcaaagcagcgcctgcctcctccctcctgggtcttccctctccctgcctcagcctcctccctcagccgctcccaaccatgagagccgaggtgggaggcatgggaaacagtgcagtgactcaccccctgcccccgcaccaaccacccatattcaggagaagaggacagacacggcacctctgagtcacccctctcctgtggagcgggcgtccgaggggccctggcatctgactcaggccacaccatggaatcactgcatccaaggccattcctgccctctctgagtctcagtttttccatttgttcagtggagagaattaaccattgatacctcctggctgggtgaggcggctcacacctgtaatcccagcactttgggaggccgaggcaggcggatcacctgaaatcaggagttcaagatcagcctggctaacatggcgaaaccccgtctctactaaaaatacaaaaattagcctggcgtggtggcgcatgcctgtaatcccagctactcaggaggctaaggcaggagaatcgcttgaacccgggaggtggaggttgccgtgagctgagattgcgtcactgaactccggcctgggtgacagaaggaggctctgccttaaaaaaaaaaaaaaaaaaaacctcctgggactgttgcaaggatgaaatgaaggattgagggattgagggattgctgagctggagctccaggtgtcctatctttctcagtggggtggcacggagcggggccgcctccctcttctctccaggcaggtggggctgtggttatgcgatagggtctcccttccctccagcccatgccagaggagcttgtaactctttatcctcatggtgcccactacgagtcatactcttccccatgctgctcatcctcctgggccccatccactcagccaaagcagaatgcagggtttcctgcctgacaacccttctcacctcccaagtcccacttttgaacaagctgatgattctgaaactggcccaatttcctaacaagccggatgcttgagaaacctacatttggacaatgagaggctgctcctgcggcctgcgggccacctcctcttccttggctcctgctttctttttagactatatcaacctacaactttagtcgggaagagggacaggggtggacctgagtttcgtctcctgtctctctggctgatgtcacctgaataaagccttcttccctggcaatacttacatctcagtgatttgctttctgtgcatctagcaacaggactctggaccaaggccctggcgttgggtaacaattctgtaatgctgcaggacttccccaatccacgcaggaatccccgcaggcatccacgcaggaatcacctgatgaagggccagggtcaggtgtgggccaccatcccaagacctcccttctctctagggccagcccctctcctctgagcacctgctgaccagcccaaagccctctccactcctcagcttgaactcccccagggtctccctgtggcccacaggtcctttggaggctcgggcatctgcatgcaaatcccaaaccactgtcccctttgcacacactgagcctgcccttgtcctcgtcctggtctaccatgcgtgtcctccctctgcacgggcatgggacatgccctctgcctccttcctgtcctggcctgcccaactcctacctaccctcagcgcagatcctcccaacacacacatgcaggcagcctcggggcctctgcgggtccctctaccacagcattcccggggaaaggcccggcgtggtggctcacgcctgtaatcccagcactttggcaggccgaggcaggaggatcgcctgagtccaggagttccagaccagcctgggcaacatggcgagaccccgtctctacaaaaaatacaaaaattagccgagcctggtggtggcaggcgactgtggttccagctgctcgggaggctgagaagtgaggatcacccgagcctgggaggtcgaggctgcagtgagccgagatcgcaccactgcattccagcctgagccacagagccagattgtctcaaaaaaagaaaaaaaaaaaaaaaaaaaaaaaaattcgctggtaggaaacataggctggttgagtacgggagtcatacagatcaggtggatcaggcggccgcacaccgcagctctacggcccgggaacgttactaaatactcccatgcctcagcttcccgccttaacgtggtaacacgttactgtagtttctccacgcagagctgctgtgaggattaaaagaggccgcgtgagttgagcatctcgtcgccattaccgtcatcacacgccccccacccaacccggcgggcccaccctctgcacccacggcgaaagcactctttctaaaccacgccccggatgtcccgcctccagcggctcggaggtcttcacttattggcctccccaaaccaacatggcggccccctacaaacttcaagcgccggtctctcctagccaatcaaaagaaagatatttctgaatcccgcctctttcagcagccttgctggccaatcagaccacaccatgaagcatcaatacagaaaagggggaacccgctggcccaatggcagcgtcctacagtgtagcctccgcctcccgattgactggcctgcttggcaaggcaagtagcggcggcgcttcaaggtgggtgttcacgttttggccgtgaaagtcgggcttgggcagcgtggcgtcgggggcgagtgtggtgtccccgttggcgccgccagctctgcgcctgggcttcccctcggctcactcaggatccgcggcctccgtgtccttcaggtgcagcggggagccggctctcagggcgcatgcgccgcccgctctgcgccaccggcctagttagggtcggagatcactgggaaggtggggaaggtgctgggttgggtccctggaactgcagtcagtgatccaaaggagtgggcctgttagggggttcacaggtcgtgggatgagctcttatgagcgccggctaagtgccgggctctggggtgcccttggcatgtacgggctcccctaattcccaagaccaaccgcccccaacccacttcataggtgagaagacggaggtcaggtcacatcatctgcccaaggtcacgcggcaggctgggggacagttccaggagggccttgaagctggggaaaggaatgtggtaccgaggactgttcaggccttgaagagtttccagcagggcagggctgggttccgatcctcggcccacctccttatcgtgtgacttccgacaagtcacttttttatcttttttttgagacaaggtctcactctgtcgcccaggttggagggcagtggtgcagtctgggctcactgcaacttctgcctcctgggttcaagcgattctcctacctcaacctcccgagtagctgggattataagtgcccaccaccacacctggctaatttctgtattttttggtagggacggggttccaccatgttagccaggctggtctcaaactcctgacctcaggtgatccacctgcctcagcctcccaaagtgctgggattacaggcgtgagccaccacacccagccctagcgagtcactcaacaaactgagtcccagcgccttatttgtgcctccctcgtggagtccttgtaaggataggatggcagcgctttccacccctgggcacggttcctgggggaggagagctaacaaagttcgctctcagtgcatgctggcgggggctggtaatgttgtttttggttagatttggggaggatgaagggaggagcagaaaggtgggaaacaggatctctgggagggagaaaggaaggatggatttaaaaggtttcttaggtgaggcagaacttggggtccacagaaactgaattgtagctcagccaagctgaatcagatggaaagctgggaggcgctgggaacaggaaagccatctgtgcctctgacagcaatggggtgcgagtagagggcaaagtgacacatgtcagtggagacttgggatccttgcggtgccagtctcagaagaggatggttcttgggcacaccccaccctccatccctttttatgccaccagatgcgctgcctgaccacgcctatgctgctgcgggccctggcccaggctgcacgtgcaggtaggaccaaagaagcctttgctgggggtaggggagtccagtctcctggtatgacgtcacgcccttctttttgcaggacctcctggtggccggagcctccacagcagtgcagtggcagccacctacagtgagtacctgggtggcctctagcctcaggtgttcctgactggtcctgctggagtaggggaagagacctgagttccagtcctggctttgtcaggggcgttcttctctgagcctgtttccacttttaaaatgattatggtgatggagactgactctgattcacaggggcagggtccatcattgccgaggttagcatgtgtgatctcagagctccctgggtgtgatggggagggggttgccaggtgtgagccatgggtacctgtgcctattgccagtccctggtgaaggcaaaggctcaagccccccacctaccccccttgattcctctttcaagccctgttgggcagggaagtgcgtctgggctccaatggccacccaagcacagggagaggtaggcacggacgggctcaggccagaggcggcctccagggtccttgctgaggctggggagaggtgtggtgagtgtacagcccctttgtagcccagcagttgcacctggaagtgagggccaggctgctctccctgaggctccagggagacagtgtgtgaggcctcttgccatggcctccctgcccgcctctctgcagagtatgtgaacatgcaggatcccgagatggacatgaagtcagtgactgaccgggcagcccgcaccctgctgtggactgagctcttccgaggtgcgtcctgggcatgaggggacagggaaggtgccgggtgggcacggatgcatgggggaggagggtgcccctgcccaccacacccgtgctgcccacaggcctgggcatgaccctgagctacctgttccgggaaccggccaccatcaactacccgttcgagaagggcccgctgagccctcgcttccgtggggagcatgcgctgcgccggtacccatccggggaggagcgttgcattgcctgcaagctctgcgaggccatctgccccgcccaggtgagcccctgccccaaccggccaccacgccagcccctgccactgggagagggaggccaggcagccctaggcccaaaccctagcccctgcttgatgtgcgtccccaggaagtccctttccccctctgagccacttccctcgtgaatgggaatgatgagggcttgttaccagagcacagagtcagtgagttggcagagtgaagcttccagccctgggcaggcgcctgacacacagaggttcccccttggggtctggccaagggtgtgacccctgggcctctgagccatggggtgacacctgaggccatccacgcctccctggatgtagccaccgtttccggagtcctgcttgtgtgcctgttgcagcttcccttccccagtggctgctcccctgaggcccggctttccgttctcttagtgggtctcgtgcttacccgtgggggccaggcctgccagcacgggaacaatatgactcggtcagagctctggtcagacccctgtgtgtgcctggcaggagccccggcagccgccgccgctactttctgtgtgcacagcaacccctcccagtgttctgtgactcgggtggctcctgtccagatcctagtttgtcctctggagcactcccaggtcctccaggccatgagctgcggccctgatgtctctactccagccacggactgagagtgcataggagtgtccccaaacagcagtcacgatggtcacaaccttggcttccagacagtgagtgctgtccacagacagacccggtgctgtgccatgtgtgtgactcacagcctctcctgtaatctccacaacccctcgaggaggtcgaggttattgtctccatctttataagcactaaaggatgagcctgccagccacaggtcccactgtgagttgtggacactacatttctgggatgggggcatatgagagtccttgccaagcacatttgaaggttttcccagccagcccctcccccagcgggctacccaggaactgagagttaggacgtgcccttgagtttgggctgtgcccccacttgctgtgtagctttggggagcccctcaacctctcggaaccttgtttttctcatccatcaaatggagagaagtagatttaaggcacaggattgcacccaacagtgtaggcattcttggcgatgttgcaggttcggctccagaccatcggggtaaactgagtcacacagctgttttggttttccagtgcatttaaaagttagatttagaccgggcacagtggctcatgcctgtaattccagcactttgagaagccgaggtgggcggatcacttgaggtcaagagttcgagaccagcctggccaacatagtgaaaccccgtctctactaaaaataacaaaacttagccgggcacgttggcaggtccctgtaatctcagctacttgctaggctgaggcacgataatcacttgaaccgggaggtgggggttgcagtgagccaaaattgaaaaaaaaaaaaaaaattagggccggttgcggtggctcacgcctgtaatcccagcactttgggaggccaaggtgggcggatcacaaggtcaggaattcaagaccagcctggccaacatgttgaaaccccgtctctagtaaaaatacaaaaattagccgggtgtggggttgcacacctgtagtcccagctactcaagaggctgaggcaggagaattgcttgaacctgggaggcggaggttgcagtgaactatgattgcaccaccatactccatcctgggccacagagcaagacttcgtctcaaaaaaaaaaaaaggatttacactgtactgtaggctgcgaagtgtctaaaacacaatgtatataccttaattaaaaatactttaggggccaggcacagtggctcacacctgtagtccaagtgctttgggaggtcaaggtgaggggattacttgagcccaggagtttgagaccagcctgggcaacatggcaaaaccccgactctacaacaacaacaaaaaatacaaaaaattagcccctgtaggcccagttacttgggaggttgaggtgggaggatcgcttgagcctgggaggttgaggctgcagtgagctatgagctgcaccactgtactccagcctgggtgacagggcaagactctgtctcaaaaaacaaaaacaacaacaaaaactttattcctaaaaagtgctgacccagagataagaagcaagcacatggttggtaaaatgacatcagtgagcttgctttatgcagggttgccccaaaccttcaatttgtaaaactcaaaatatctggaaagcttggtgaggcgaggcgggactgtaactcagcactcaccgcagggtgagacccttagggcagcgggtgctacactgaacaaagcggtgaacagccccctcgtgagagggggttcttggcagatgacgccagcagctgacaaacaggcaaggcaggccgggcacggtggctcacgcttgtaatcccagcactttgggagtccaaggtaagcggatcacaaggtcaagagatcgagaccatcctggtctacatggtgaaaccccatctctactaaaaaatacaaaaattagctgggcgtggtgatgcacacttgtagtcccagctactcagggggctgaggcaggagaatcacttgaaccgggaaggccgaggttgcagtgagccgagattgtgctgctgcactccagcctggcgacagagcgagactctatctcaaaaaaaaaaaaaaaaaaaaaaaaaccagcaaggcagggacgccagcagggcacgtgctgaggagacaggcgcgagcaccagaggtgcagggcggcctcttagccggagtccaggaggcctttgaggggagagggcttctggcagaccccaggggtggggatgagcagtgacaggggccctgggggctgggatgtgacagggcagcgtggcagtgtctggtggcccctcccgcaggccatcaccatcgaggctgagccaagagctgatggcagccgccggaccacccgctatgacatcgacatgaccaagtgcatctactgcggcttctgccaggaggcctgtcccgtggatgccatcgtcgaggcacgtgaggcccccgggtgggagggggcctgaggctcctcagcagggcctaaccaccgtccctgcacctcaacctgcagggccccaactttgagttctccacggagacccatgaggagctgctgtacaacaaggagaagttgctcaacaacggggacaagtgggaggccgagatcgccgccaacatccaggctgactacttgtatcggtgacgccccaccggcccgcagcccctgctgcccaataaaaccactccgaccccacggcctcttgtcttgactctggtggtccagggtggggccgttcccggcctgcctgaggcctgtggtgcctccaactggactaggtcgccacctagtctttatgctctctggagtcctgctgccccagccctgccttcctgtagactccagggccccaccaggctctcatggctagaccacaggccgcagcatccctgtcaccctgcctcttcctgggcgtcttccccaaggcccagcgatgccagaggtcaccacagacctgccgttcccactctcccgggtgtcctggctggggcctgggcctcctgtctcccaagagccatccacttgtaagacgcttaggacttggagcctcccaagacctcaggctgaagaacagcaagtggcagaaactcaggccggggcatccttgctgggggtaggaggaagcctgcttggggtgacagtcacacgagggtgacacaggccctgctggccctgagctggcctgcgtccagccacatcctctttcctgtgttccctacgccagggtgctggcccggccactgctcaccacttcctgctttgctggcccagcgacacggtggggtttccctagggccacacacaagccccttgcccatataatggccaaaagcagcccccctgaacttgtgctaagtactgtggaaggatttcacttcatttgcagtgaggaaaccagctccgagaggtgaaagggcttgctcagggccatgcagggcacatcccataataaaactcagttcagagaccttgaccccccccatctaccatcatttccaaaagtgctttttacaaagcactactttgtaaaaagctacttcttcgaaagaacaagtttcctggcccagtgagtgttggaaatgctccagctgctgtgtgcctgctggcaggtactgcatggtagacattcaaggctctgagaaggcctgcagcaaaaacaccagcctctcccagcccattcccagggagcttttctcaggtctaacacctgggcctccttcctagaccaggcattgccatctaatgccaaagtggccaggctcccgcttgggccccacagcctgtggcactggggtgagaagtaactgcaggaggcgaggggaagcctggagcccgggaagtgtccacaggtctggcccgcagctcatcttggccactgatgaaaacaggtgttctttccaaaaacaaggcaggcgcaggactcctgaagcaccgccggtttagcttttcccagacgtaaccgccgtcagagcgtggcatggagcctgtagctgtgcactgaatacttctattccaagcgggtcagtctttccagctcaccgctgggttctttcccttaccgtggtctcccaggcacttactgctgagaccccactcaggctgtctggttgtatcaggccccgaccctgtcagaacaggcctatggcgcccaaccacaagtcccccaattttctgaggaaccacagctgagcttggctgtgactcagtttccaggcccggctctggggctccacttgtccacccctgccgcagccccacaggcctgtgctcgctgtgtggggcttagggatcaccagagctgaagggcccctggcctccagtgggaatgccccaggcctgtccaaagtgcaggcagctggacggtcgtgagtcccagcttccaggcactaggacctgatgacgcccatggtgctgacctggagcaaggtcacagtgacacccccctctaccccccgcggctgcagctgcaggtggagctgacagctggcctctggccccagggtatctcccagggcctgctgggtgcggggcgctgggcagaacaaggcagcatggcctggccctgtgtcctgctgccagtgaagcaggcccagagtggggcagccacccacccaagggccagagcggggcctctccagggtggtcaagagcaggaaggtgtaagcaccggcgggtttcactgccgcccaagggaggggtcccggaggtgggggagcatcctggggaccccaagcccatgagcctgcgaatgttggggtcccatcagccagaggcgcacaagcctcgaagtgagaggagagcagggtctcatctcctatcctgagctgggcctgagcggagctgcccctgcatcggggccagcatagacgcgcgcggttggcagtggtctgttatccgctcctttctccaggcctcctctccgggattaagcgcctcaggacccgtccgccaggccacagcctgggctcaacctctcccagacttcctggactccagtggagccttgggccgggggcggggcgtccctggcccctccccgtcgtcccgcctgcccggaaaggagtgagcggcgcctagtcccgggctggcgggagtgcagttctgagtcccgcccggcgtgcgcggagcggggcagccagcagcggaggcgcggcgcgcagcacacccggggtgagtgcccctgccggggtctgcggagccccagaatttcctgcccaccctcttccccctgccccggggaggagatcctggcgccccacccagttggctccgtgaatgcagctcagcccgccaccccgcagggtgtcaggccttgcggggggccacggaggatccccaagggaggaggagaaggatggggtgtttaccaacacagcccagcgttcccgggcctggtgtgcgcggagctttccccgctgctgcttccttggagggagggacccattctacagatggggaagctgagaccacacaactaggaagtgtcagagctggagaccagctgggtcatttgactccagagcccaccccatttggaatggagggggcgccagaccctctcctactgccttcccatcatctggaggggagggcagaggtgcagagagacctgctgggttcctggaggggccaggaaaggggcacagggtgaggagtgggctggagcctggaccccagggccgcaggatggaggcgtattcatttacaccataaaagtggctgggtgaccctggctagagcggggaccaagggggacaggggtagggggtgagccagtggagcctcacatgccaggcacgggggctgatcacgtccccacacctttccccccgcccattacaggttgttcccccaccccctgggaagtgctggaaggagcccggccctcgagccctcggcatagtggctgtgggagccctgatggccctgagccaggggtgacccctccccagatccccagagctgattccccacacctccttatttggccagcacagccccaaagggagccaggtcagacacaaccctcctctgagctcaccctttgtgctgggcacataacattggactttacctctccaagtgtcagtggagtcctgtatgaaacaaaagcaccgtaccccctccccaagggtttctccccccagggattagtgtgaggtcgtgtggatgaagggattcagttgaggctctggttatttttgtcacctccctagatcctgtctctgtcaggggtgccacgtcccattcacccaaagaggaagtagaggcacagagagggtgagagacttgcccaaggtcacacacccaatctcagcctgggctccaagtccctctgccctgtggccgggcctggtccttagggatggaacccagccccgctgccccctgccctgcccacctgcagccttgggccatctgctcagtgttccctcgttccctccttctctcctttcccaggctggggctggggctgcgtttccctgtttagagttaagtaaaccagacccaggggaggaagtgactggctgggcaggcggggccctgaccaggcctgtcccctccccctaattttcgagctaagcaactgattcccacagaggggccctgggccctgagagcagtggctttggagctggaggggccccagcatccagggcgggttggaggtggcctggcacctgcccccaccccacatcggccttgagcaaggccccgggcccttccccgccattctgtagtttcacttttgttggtttcaacacctggaaggctgcggctgctgccgggcggcccgggcctcaggggacagcccccccacagcagtgctccctggctagccccagggtacccggtggagatgcccgctcctaccactcagcacatgcagctccacagggagcagcgagggctccagccacccccggggcagccctgggcctaagtgcctgggccagtggggtcctgtctagggtgacggcagcccgagaggagggaggccagagtgaaggtgggggtggagccggtgtcactgggagacgctggaggtaggggcgggggtccccatgggcagagcaagccaggagagagcttgaggtcggcctgagggtgggcttcggggtctcccagtcccactgcttactttctgcgtgacctcagcaccgcatcaagcctgcccaggcctcagtttccacctctgtcagatgggggtggtaacagcagcttccaggattcagtgagtgaaggtgcacaggtgcccgtggttgggaactgtctgtggtctgcccctgactggcccccatccgtgtccacccacaggaccatgggctccatgttccggagcgaggaggtggccctggtccagctctttctgcccacagcggctgcctacacctgcgtgagtcggctgggcgagctgggcctcgtggagttcagagacgtgagttgggtgggcaggcgtgggaagggggctactgccaaggttagcccggaggccggtccaggatggggactgccccccctccgccatagggccctggccccatttgaaccccagcggcccctgccatgggcactgctcatgggaagcccgcagctgaggcccctgagctggctcctccccataccctcctggggcatggggtctggtctgtgctctgatctgcgtcttgtggctcccagggcactccacacctttctggaggaggcagctaaggcctggggagagtcaggcctgggctctagggtgaggagctccctgacccccttcccgggacactcacccctccgtgtggcacccacagctcaacgcctcggtgagcgccttccagagacgctttgtggttgatgttcggcgctgtgaggagctggagaagaccttcagtgagttggtcccaggcctacattccaggcaggcttcctggaggaggcatgggccaagtttgatctgaaaggaagagtctgggtttgccaggtggaaggcagagaagggaggtatatgcagggccctgcagggccaagacagagcagctgggatctgtgaagtgtgcttgcgaaggtggctgccttgtgtgggctgagcagagggcctagggcagggctggctggggaggcctcgaatacagcataagagcccaggacttcgtcctgtgggcgccaggaagccacaggggtttctaagcagggaagaggcacagacagctttctcctctacagctgggctggggtgggtggggcccaggatctagggtagggtacccctaaggagcaggcaaaagggacccctgccctgggcaacccctctcaggaggagcctgtgggggcaccaaggcaggggcatggggcaggcagggttttgtgtttgctggtgcagtttacagcttttcaatgatcaggcagacacaggactcacgccagctccggtcccaagccctgcagcgcaagggccggcctgtggggagacctcaggccctcttctgagtggtggccaagggactggggagggagagtgagcccagacctgagctcagggaggggagcacagcttctggatgaaagtttggccgggattttctggccacctccacctggtgaatccagcagctggtggccgatggagtttggggcagcaggtggggccctcaactgttgagacaacctcaactgcaccccactcccgttcctctgcgcccagccttcctgcaggaggaggtgcggcgggctgggctggtcctgcccccgccaaaggggaggctgccggcacccccaccccgggacctgctgcgcatccaggaggagacggagcgcctggcccaggagctgcgggatgtgcggggcaaccagcaggccctgcgggcccagctgcaccagctgcagctccacgccgccgtgctacgccagggccatgaacctcaggtcagctcccacccaggcaggagactggggggctggggaggggctgtccagcctagggctcatggtgcttctgggttcctagctggcagccgcccacacagatggggcctcagagaggacgcccctgctccaggcccccggggggccgcaccaggacctgagggtcaagtgagtgagggatgacctcatgccctttctggccagcccagaacccctggccagtcgctgggctgggccaggctgagctccgactccttgtccagtgctctccccaggctggccccgcctcctccttcaggcccggaacttcccacagtcccaagccctagccctagggggttctcctcttctggtcctgcccgggaggcctcctgccttcccctgtgggcagggccagtgtgcccaattgcccgattgcccgtgctgggcagggtcctgcccggggggcctggtgggggaggcagggcaggaggttggagcagccctgcccagccccgtggccgccagctttgtggcaggtgccgtggagccccacaaggcccctgccctagagcgcctgctctggagggcctgccgcggcttcctcattgccagcttcagggagctggagcagccgctggagcaccccgtgacggtgagcagctggcgctgggctggggggtcctgggcagagcgggaccccagagtcagctgagcctgctctgcagggcgagccagccacgtggatgaccttcctcatctcctactggggtgagcagatcggacagaagatccgcaagatcacggactggtgagtcactgggaacacccgccccaccgccctgctccccaggcccctgctgtcacctcccagcccgccctatcgtgactcctccccatgagctcccttcagactcagagtctcgtagctgtgtccttctggcccctcacgcagcgcatcctccctccagcttccactgccacgtcttcccgtttctgcagcaggaggaggcccgcctcggggccctgcagcagctgcaacagcagagccaggagctgcaggaggtgggtgcccccggccttccggaggcgggtgtaggaggtgggtgcccccggcctcccggaggtgggtgcaggaggtgggtgccctggcctggcctccaggaggtgggtgcaggaggtgggtgccctggcctggcctccaggaggtgggtgcaggaggtgggtgcccccggcccagccaccccacctgcctgcccagcccccgctgactgcccactctggcgcaggtcctcggggagacagagcggttcctgagccaggtgctaggccgggtgctgcagctgctgccgccagggcaggtgcaggtccacaagatgaaggccgtgtacctggccctgaaccagtgcagcgtgagcaccacgcacaagtgcctcattgccgaggcctggtgctctgtgcgagacctgcccgccctgcaggaggccctgcgggacagctcggtgagcagcctgaggcctcgccccctctccgcccgcccctcctaccaggccggggcgtttctgcctcacttccagcctctggctccctgcacctgggctttgcctaggggctccttctcctcccagcctcctccatggcccaccgcttccagggagtctgccctgatggccctggcccagcaagccctaccctgactttcctaagtccctggaggctgcacaggatagttttaaagtcagaagcctcattccaatccaggcccccctgtgaccttaggcctgctcatggtctgtggaaccggtgtgatgcccctgcctccgggggtcacccgccgcgcacagcaggtgcttgcgggtgaggctgggctccttctcctgggccgtccctaggaggcagcatgcttgcctttcccaagcaattgccaatccatgtggtgtctttgggcccccaccagggcagagcagggctgatcatctcacgtcagagagaggggaaggggctgcccagtgagcccccacagggctctacatctccagctgggcctggctggagatcccagggtccctgaaggcccccgccaccgttctggtctgtctctgccctggcacccagatggaggagggagtgagtgccgtggctcaccgcatcccctgccgggacatgccccccacactcatccgcaccaaccgcttcacggccagcttccagggcatcgtggatgcctacggcgtgggccgctaccaggaggtcaaccccggtgagagccacggcatccttacccgtgtcctgggaggctcagctgccccactgggtgggtgtgagcctgagggggaggtatctccatcctgggcctggcctgccctcctgggatgaggggcacacatcccatcactctcaaggggctgttgggctctgcagccagtgtgaggctttatgtcggcccccagccaactcccccttgttgagtttacaagggagccggcacgggcttgtgcaaagaacagaggctgtgcggtgggcatggcccaggttggaagcccatctcgcctactttgagacatttcttagcttctctgagcctcagctgcctcacctgcaaaatggaaataatagcgcaaacctcagaggaatgttgggaagcttagtgactgttggagactgcaagctggagccaggggcagcctttggtgtggttgctttggttgcacagctttttttttttttttgagatagagtcttgctcagttgcccaggctggagtgcaatggcatgatctcggctcactgaaacctccgcctcccaggttcaagcgattctcctgcctcagcctcccaagtagctgggattacaggcacgcaccaccacgcctggctaatttcatatttttagtagagatggggtttcaccatgttggtcaggctggtcttgaacccccgacctcacgtgatccacccacacaggccgttgggggcccaagcaccctgactcttgcccactggatgaggcagggcccctccctgtcctgtgaccaagtcccctcccgacatgggctccaccacatcacacccatgctatgggccgggcccccactcagtgtcactgggggcactggggggtttgctgcttctgcagggccagtgtcctggggctggatctgggccccaacaggattcccctgcacgtgggcagaggctggtgcagctagagcatcacctggaggcccgtggcagatagaatgctgccagctcaaagcaccagccgtcggggcagcgtgtttgccagggaagctgtaacaaagtgccaccggctactggcttaaggggcagacacggtcccacagtcctggaggctggaagtccaagaccaaggtgtcagcaggggccgggggcactggctgatgcctgtgatctcagcactttgggaggctgtggtgggaggaggatctctggagtccaggagttcgagaccagcctgggcaacatagcaagcccttgtatcttaaaaaaataaaagatgatgaggtgttgtcagcaggagtggctccttctgaggctgtccaggaagatctgttcccggcctctctcctgggcttggagcggccgtcctcatcttcacacactgttctccttctatgtgggtccaaatgttccttttcataaggacatcgggcacactggattggggcccactgtaatggccttatcttaacccagtgacctctgtaaggaccctgtctccaaagaaggtcacatctggagttcctgggggttgcgactccagtgtatcttttttggggtcacaacacagcccctgacagtgtgtatgttggggtcctcctgcctcccatgaggacttgttcccattttactgatgggaagtcgagacttcagagctgaagtgaccagctcggcctcccggaacttgccatgtgccagctggggctgcctgtggctccctgtcctctctggcttctgtgtggagctctgggaacagcaacagctgaagctgctaacttcctgtggctccagcagctggcccgtgctgcccgtggagaacttatgaagtggtctggtgttacctgcattttacagatggggaaatggaggctcagagaggtgaagtggctgggccaaggtcacacagctcctaagtggtgggttctttttttttttttttttttcggagacagaatcttcgctctgtcgcgcaggctggagtgcagtggcgcgagctcggctcactgcaacctccgcctcccgggttcaaatgattctcctgcctcagcctcctgagtagctgggattacaggcacctgccaccatgcccagctaatttttctgtttttagtacaggcagggtttcaccgtgtgggccaggctggtctcgaactcctgacctcgggtgatgcccccccccccccccgtctcggcctcccagagtgctgggattacaggcatgagccactgtgcctggctgctaagtgatgggttcttgactgcaggccagcagggcctccgtggcgtcttgggccgggaggcagatgctggtgtgttcgggggttcccagctcacccacctctgcccacagctccctacaccatcatcaccttccccttcctgtttgctgtgatgttcggggatgtgggccacgggctgctcatgttcctgttcgccctggccatggtccttgcggagaaccgaccggctgtgaaggccgcgcagaacgaggtgaggggcggggctggggtcctgatgagggtagcagggccaggcagcccctcaccacaccactgcccccccagatctggcagactttcttcaggggccgctacctgctcctgcttatgggcctgttctccatctacaccggcttcatctacaacgagtgcttcagtcgcgccaccagcatcttcccctcgggctggagtgtggccgccatggccaaccagtctggctggaggtgaggcccgggccccagcccggctgggggccccgcagcacccgcagccctgaccgccctcccctgcgttgccgcagtgatgcattcctggcccagcacacgatgcttaccctggatcccaacgtcaccggtgtcttcctgggaccctacccctttggcatcgatcctgtgagtcctgggatggagtgtccgtgggtggtgaaggcagctgggagtgggggctggggctcccctcggttcagccgtcctgcagcgctgtcgctgagcactcctgtgtgccaggccctttcctcagcacaagaggcagacaagcctcctgccctgcggagcctgcatcacagtcccctgagtgtgcggaggcaaagcgagaccagccaggaaccagtctcctgagtgtgcagaggcaaagcgagactggacaggaaccagcctgcagcttgcactgtgccaagcactgttcccaaccctctgtggaagtgattttcttttttcttttttttatttttggatatagagtctcattctgttgcccaggctggagtgcagtggtgtgatcttggctcactgcaacctccatctcccgggttcaagcgattcccctgcttcagcctcctgagtagctgggattacaggcgcccgccaccatgcctggctaatttctgtatttttagtagagacagggtttcaccatgttggctaggctggtctcgaactcctgacctcatgtgatccacctgcttcagcctctcgaagtgctgggattacaggcgtgagtcaccgcgcccagcctgattttctatttgaacctcgtaacaaccccgtgggcctcacattagtagtgtcctcacctaaagaagagactgaggcacagaggtcatgcccaaggtcacccaggctggcaccgtggcagctggcccatctgcgctctgttgcccctcggtgggtgggtgatggatgaggctgcaggctccgagggggaaaacagggtggtgagagagtgactcgggccggggacttcctggcagtgatggcgagggagcccctgagtccagcccacccctgctgccaccctagatttggagcctggctgccaaccacttgagcttcctcaactccttcaagatgaagatgtccgtcatcctgggcgtcgtgcacatggcctttggggtggtcctcggagtcttcaaccacgtgtgagggccaaggctgcccgggggacgggaggctggcaggccagagtgggccccagtgagcacacctccctcttgcccgccaggcactttggccagaggcaccggctgctgctggagacgctgccggagctcaccttcctgctgggactcttcggttacctcgtgttcctagtcatctacaagtggctgtgtgtctgggctgccagggccgcctcggcccccagcatcctcatccacttcatcaacatgttcctcttctcccacagccccagcaacaggctgctctacccccggcaggtgggctgcggctggtgggggccgggctcacacggcctcatggggaccccgcggtcacagggccactgggagctgcaagatcctcgtccgagaaacggggatgcaggccccgggccgtgcagacagggccgtcagaggtgatggtgtgcatctttagcaggtggcacaactggcactgggaaccgggggtcccttccctcaggagtccttatggaggcagaccctcacccagtgagggcacggagcccccgggggccctggagggaggagcgaccgcaggctctctgggccccgtgactgctgtgactcaggttcctttgcaggtgtgcacagcagggacgccctgactctcgccctctccctggcaggaggtggtccaggccacgctggtggtcctggccttggccatggtgcccatcctgctgcttggcacacccctgcacctgctgcaccgccaccgccgccgcctgcggaggaggcccgctgaccgacaggtgggaccggggcctaaggtgtggggggctgcttgcggggagaggccactgtccggtgtgtccctgactcctcgcttcctgacagactcctgagtggccaggagcaggcctggcgggtggtgggggacctcctggggctggagtgctgccaacactgcctgctcatgccccaggaggaaaacaaggccgggttgctggacctgcctgacgcatctgtgaatggctggagctccgatgaggaaaaggcagggggcctggatgatgaagaggaggccgaggtgggtgcagtgccttcctgggggtgggacggctgaggccctgccggccctcactgcacccgccccgcagctcgtcccctccgaggtgctcatgcaccaggccatccacaccatcgagttctgcctgggctgcgtctccaacaccgcctcctacctgcgcctgtgggccctgagcctggcccacgcccgtgagtgacctggccaccgacggctggccccagctcctggcttctcacataccgctgctggctgggcgggttgcttctctctgggcctcagtttcccctctgtaaagtgggactgtccaaggaggtccctcgctggccccccgtgcagggagggcttcaggctgcggcaggtaggtagggggctggcaggcacccacttgccgttggcccccactgtctcctttgcttgcagagctgtccgaggttctgtgggccatggtgatgcgcataggcctgggcctgggccgggaggtgggcgtggcggctgtggtgctggtccccatctttgccgcctttgccgtgatgaccgtggctatcctgctggtgatggagggactctcagccttcctgcacgccctgcggctgcactggtgagcgaccacccactggcctgggctgctcaaggcgtgagttcccctcaccaacccctctgcttctcacccccagggtggaattccagaacaagttctactcaggcacgggctacaagctgagtcccttcaccttcgctgccacagatgactagggcccactgcaggtcctgccagacctccttcctgacctctgaggcaggagaggaataaagacggtccgccctggcagtgatgtctcgtctctcttccctcctttttagctgaggcaggtggcagggtagaaggcatggtgtaggatctgggacctcaaaagtcaaggcctggacctgagcagatctgcaataatgtcagactcttggggtgaaaaggggcagaaaagggccaaggagagatgtttccagcacattctaacttggagtgagcaaatgtcttcccaggccgggtcaggggagtgagctccccatccttggaggtgtgcacctggctgtgagcgggtgtctgggttactctctgttgggagtggtgccaatatccatgccctggtgccgggcctcaggggtctggaagtacagagcagtgtggggcacctgagccccggccagtgctccatgcagggccatggtgtcacacgcccaaggccacacacctgccaggaagggtagaggctgtccccagcagcagacattacccaggaccccggggttcagaacaggggctgagcctgactccaggcccagcctcccctcacctgagactacagtcttcctgatccctcccaggtggtccttcctgcgttgctggcagaatgggggtggctttctgcagttccctctggcctgggtcccacccccactgggaggcagaggaagtgcttcccagaagccaacaagctgcaaagtggttcttcccacagctgtggctgaggccagctgctgggaggagcctgtccattggctcctggactgctttgctcaggacctctggatgccaggggtcgtatcaggggctctaaggtaattccacatgcccagcagattcagcttagagaaacggtgctcacagtgctggggtaggagcagagaaggctaaatgaaggactccggagagctgcaggtggatctggaccaaatccagaacccaacgccttactccctcctggggagagagctgggcagagacttggggcgggcagtgaggtggggataggtgagcagcactcgtggtgagtggccccagtgtgatttaggaggggtgcagtgtgggatcccagggacatgaccagtcagccccgccctggctttgacatgggggtgcctggcagtggtggctagagaagtccagtttgccaagagaatggcacataaggcactggggtgggcacctctggggcatggacatagggagacatagggatggggtgggtcacctgcgtggaggactgggcactgaacagcacaggcccgagcccatccttgtccacgtgagcttatggcctgatgtagagaccaccaggggctccaggaaagttaagctgcatggagagaaacgatgggccagggccgggcccagggtggtttagggaatggcagtgtcctgggtagaataggaaggcctgagactgtgactgagctgacagtggggcaaagtgaaggagcccagtattggaagatcggctccacatgtatctctgcgaggagactgcaagcgagctcgtgtggaccaggcagaggcgagggctgagtgaggccagcagtggcctgggcacaggaagacggtgagtgagaagccactggagctcctgtgcaggagcgcaacacctttactgcttcattcagtttggcttcacctgcttaaaactgtaactctctagaaggctgaacagcaaaagcctccctcctgcccagccgctcagcatccccaggcaccagcactgctcccagtctccaacgtcctccagggctcttcgcttctgggctagaagcagggaaaccagagtgtgctggggaagaagaggaggaggtggaggagggctgatgatggggccacatgctgctgggatgccagctgagagcagcggagcactgctaagctaaggggctgagtgggtgcagatggagccctccgtgggctccttcaggtaccaggagccctgcctgagattcaggacacatccaagggtgacagcttgaggttgggtttttatttttttatttgtatagtacaatctctgtggtagcagaaatatatgcacaaaaaacaattcaaataagagttcagagtaaaaaaaagtcagctaagactgtatcccgcaggacatttcatatatatggatttcacagctacactcgatccacgccccacaccacatacaggctgctgtctcccacaagaatgatgatgtcaggggcatcaggaaaggtaagggccgggaaaccgggcccttggagaaccctgcccaggggaggcccagcctactcacaggatccgacactccaggcagagcagagggcaggagaggcccaaagagctaggtcaagcagctggctcccctgggaggggagccgggagacagggaggtcctcacactgcccccgtggccacgcatggctgtctgcacactccatcaggaggaagggcaggggagaagtcacatgcagtacagtgaaactcatcagtgtcacacacgcccagcaggaggggagagctctgctccacacgctggcggccttggctgctccagagcaatccgctgctccagcttcagccatgggaccaagagggtaaaggagcagcttctggaggccccaggcagaggccaccttgcagcagtgactggcgactttgcagtacatctctgctcacttgctgtcccttgggagtgagcaccgtctataacacatcgccatctacaaaagcctggtcacagtgttcaccagcacattcatgaaaatttaaatcaacattaaccaaagtacctgcaagtaacactgcttactcttgctgtttgcctcatctgactggaaaccttagcccccaaatatgaaatgccttctctagattaaaaggattcagagatgttgcactattgcactatatttctgcttcccgatctcgtttctgagtcctagtgaaatcgtaaacaagagatgaaataaacgtcgctccattttaataccgtctttagtatcatacacatgtgttcagtagtgagccacccaaagcctcctgccacaggagcagtagtcgaagcacagaggggaccccgctctgctgcctccccatgcagtccagtgatgaggtggatggagtcctccccacagtcacaccc

SEQ ID NO: 7 - DNA, 93972 bp, Homo sapiens
gaattctaacccatcttaaaggacattatagctgcatttataaagttggcttgggagataccagttatattgtataagtacacatacatgtataggatatgtgtatgctttcccataaggtagagcaaaaagaaggaaagcagaagacttgagtcatactatatttaattctctctttaaccatgatgtgatttattattgggggctctgtatttgctcagccacatctctcaattaatgcaaatcttgacaattttttatcaatcctgacaatttatcataaattctggctttttttgttgtgataggaacaaaaccctcattgtagaccataaatatctccttccattataggccagattcattctaaagagctggctatacattagcaatttcatcacagctagatcacagcaaaaataaataatagaaactttaaagctgatttgaaaatatttggaaaggaatttaaaatcctcggcacagtgtgtggcagctcagcttctaaagcacacagcagctgttgcctggctcgcatcttagaagcttctaagcctgttctctactttgcttcttttgtaccatagccatcttttggagttcttgattttggttcccctcctcatgttgtcacagtactcccaatgaccaacagtctccaatggccattaatatctgaaactcttaactggcaacaagtatgactgctaaactctgcagagctaggaaaccaaatatacttaactctgagactctaggcttcatggtttcctaagtttaaactacaaccaaaaaagtgtgtttgaactaaggactcgaccaactgaataattatattgaaaatatagattcccacctaagaagcaaagaaatagtttttttctaacaaaaatcagtttgttgtctatgtcaactgtcagattgttagaggtatgcttattatccgtatagaaaactactaatttcccatccagttttttttgggttttttttttttttttttgagacggggtctctctctgtcccccaggctgcagtgcagtggcatgatcttggctcactgcaatctccacctcctgggcttaagagatcttctcacctcagcctccaaagttgctgggaccacaggcacatgccaccacgcccagctatttttttatagagatagggtttggccatgttgcccaggctggtttcaaactcctggactcaagcaatccacctgccttggcctcccaaagtgttggaattacaggagtgagccaccatgaccagccctaatttccctttctatccaaggtgctttcaagtatggtttctaccttacatcagtagatatagcttcaggaatggaaactcatttaacatttgcctaataaaaatataactgagaagctaaatgtagggtacctcctccccccaaattggaattatatgtaaaacatactccattctattagtttggtaagagctaattacattttaagtggcttaaattattctttttatttttcttagttacttaatagtcttttttcttagaaataaatcgggacatagaattctgttcaaacaaattttatttccagacatttctactgtatttaactactgtcaggtactacttccagactgctaaaatttcaaaatggaagaaagactaacaattgacaatgaatctttattagaggaaggctaattgccaagtagtaggctatgctgcagctggcttttactaagtgactcatataataaaccagaacattctagagttgggctgtccaatacagtggccacgagctacatgtgactattttaatttaaattaattaaaattaaaaacaatttaaaactcagttcaacagccacacttgccacattccacatattcgttagtgacatgtggctgatgacgagtgtatcagacagcacagatgcagaaccctccattactcccatcactatagcactgttctagagcacaggattaaactcccaggttagtctagcccacagaggagcaccttgtaacacatttaaaatgcttcttaagttagaaatgaaagcctcataaatcagatttaaacaatagttttaaatcacatgtaatttcagcatctacttattattgtaaaagtgttgtataaatgcaaaacacaaaaaacagcagaaatgggacttaatcgttgcagaacgtaaacagtcctcaaagaaaaaatgactatcaagacatagcaggccaagtgcagtggttcatgcctgtaatcctagcattttgagaggactagacgggtgcatcacttaaggccaggagtttgagaccatcctgggaaacatggtgaaaccctgcctctacaaaaaatacaaaattagctgggcgtggtggctcactcctgtagtcccagctactcaggaggctgaggtgggaggatcacctgagcccaggaggtcgaggctgcagtgagccatggttgtgccactacactacagcctgggtggcaaagtgagatcctgtctcaaaaaataaaggcacaccagtaaaagtgccaaaataatgatgaaagatttcaaaaactatactttgaaactgcaacctgattaaatttaaaacccaagctgcatggtgaacacaagaatcttttctgcttgtgtattaacagcaaggggtctgtgttttcagctggcatcaactgttgtcctagctggatgccagctatctgcacctaatgacaaagtgacctcagatatcctcagcaagtgcacacgtgtgtggaatagctacgtaccttcaaacatactaacttgttcccagcatttttagatcttaaccatttccacagcttgacagagtcaaggaaaagctatccaattaaagggtttcttcacattatgacaatttttttaatgaattaacatctagactgccaatttgaactttaatatttctaaacatataatcaaatatcatatggatatgatctactttttagattgagctgaaataggccggtcttttaaaaaatttagtttgaaaactactctgctctatttcattaagataaaaatgggcccttccaaagaagattaaaatggatatcagggccaggcgcggtggctcatgcctgtaatcccagtactttgtgaggccaaggcgggcaggtcacaaggtcaggagatcgaaaccatcctggctaacatggtgaaacctcatctctactaaaaatacaaaaattagccaggcgtggtggcggacacctgtagtcccagctacttgaaaggctgaggcaggagaatggcgtgaacccaggaggcgcagcttgcagtgagctgagattgcaccactgcactccagcctgggcaacagagcaagactccatctcaaaaaaaaaaaaaaaaaaaaaaaaaaagccaggcacggtggctcacacctataatcccagcactttggaggccaaggtggacggatcacgaggtcaggagatcgagaccatcctggctaacacggtgaaaccccgtctctactaaaaatacaaaaagtgagccaggcgtggtggcaggcacctgtagtcccagctactcaggaggctgaggcaggagaatggcgtgaacccgggaggcagagtttgcagtaagccgagattgcaccactgcacaccagcctgggtgacagagcaagactccgtcgcaaaaaaaaaaaaaaaaaaaaaaaaaacaacaggtatcaaaatcctaccacaggccaggcgtggtggctcacacctgtaatcccagcaccgcgagagggtgaggcgggcagatcacctgaggtcacaagtttgagaccagcctggccaacatggtgaaaccctgtctctactaaaaatacaaaaattaggcgggtgtagtggcacacccataatcccagctactcggaaagctgaggcaggagaatggcttgaacccgggaggcagaggctgcagtgagccgagatcgtgccactgcattccagcctgagctacacagccagactccatctcaggaaaaaaaaaaaaaattctaccacagaaatacctcaacctggccgggtgcggtggctcatgcctgtaatcccagcactttgggggaccacggcgggtggatcacttgaggtcaggagtttgagaccagcctgaccaacatggtgaaaccccgtctctactaaaaaagtacaaaattagccaggcgtggtggcatgcataacgtcagctacttgggaggcttaggcaggagaatcacttgaacccgggaggcagaggttgcagtgagctgagatcacgccattgcactccagcctgggcaacaagagtgaaactccatctcaaaaatatatatatcaacctaatatttctaccgtgctcaatgaaatagtaaattcatgacattaataataataataataaacccagacaagttgggatatcctataactggataattcaataggtactttaagaattagattatctaatataaaactttagaaagattatgactgtaacaaacaactcaaagttttaaagaaatctcagagaaacagttattaaattcagcttcgttgagatcatactttgttaactgggactatcctctaaaatcttttggataatgttataaaaacaataccttctccacattagaactttataatctaaatctgagctgaaaattttaatcaatatgtagaaccaagaatcatcaagcactattgaagatttaaccaacattgtaccttctctggatgtaaaactgggaatacttgcactagtttactaataaataataactaaaaaaaacacgaattaacttagaatgcaaaccaagctgtgcagcccaattaaagtaaaagtaaaagcaatatactcaaatatctttagtaacaccattaaagtatttaaaatctctttccaaggtatctcagcaaagaggatttaaaatgttaacaggatccccccctcccaaagtagcctaccaactcaccatctgcaaaatcgctccatacagccgcaggagcactttccgaggctcatcaccaagggtggctgtggtgtcaggtagggagcactggaacagcatgttgctaaggccgcctctgtcagaaataagaggacagtaagtatctttattgcaggtgagctaaatcactcttcttggataaatatggatgaaaagtcagggttacacaagaactgttctcatcttatctcgatttattctctcaatttaactccatgagtcacattaaaaacagacaaattccctttctgtttttctgcagtagaggtggggaagcgtttttgaaattgcccgtgtgggccgggcacggtggctcacgcctgtaatcccagcactttgggaggccgaggcgggtggatcacaaggtcaaggaatctagaccatcctggctaacacggtgaaaccccgtctctactaaaaaaatacaaaaaattagccaggcgtggtggcaggtgcctgtagtcccagcaactcaggaggctgaggcaggagaatggcatgaacccgggaggcgaagcttgcagtgagccgagatggcaccactgcactccagcctgggcgacagagcaagactccgtctcaaaaaaaaaaaaaaaaaaatcttgaggcaatatttaaaccttcttctctagggctttccatttgatatgtattaatagttccaagatcttctacgctagtgttactaaaaatctgtcaactgattttgactaggagcttgttcaaaaaactcccaacattaactggttaccacggccttcagatgaaacaggagacctcaatactctaatcacacaccaagtaagtagctaagcaaggaatcaaacccaggcatatggctcgagtccctgcttgtaactaaccatgaagagttgtcaaagagataggaggcaaagctggagagcaccatgtgccacattaaagacattacaggaggtcgggcgcagtggctcatgcctgtaatcccagcactttgggaggccaaggcaggtggatcacctgaggtcaagagtttgacaccagcctggccaacatggtgaaagcctgtctctactaaaaatataaattagccgggtgtggtggcacacaccttgtaataccagctacttgagaggctgaggcagaagaatcgcttgaacccaggaggcagaggttgcagtgagccgttatcgcgccactgtactccagcctgggcgacagagtgagactcctatctcaaaaaaaaaaaaaaaaaaaaagaaaaagaaaagataaaagaaaaatgtcataggagctgcgtgagctgcaaaatcaccttccatcaggactactctctataaacctctatgacacaaacatctccatgtcctattactgctataacaaattactacaaatttagtggcttaaaactgaaaacagattctgatcgagctcattaatttttaaaaataagggtaactaggtggaaatggggagttggtttaagtttaatgggtacagagtttcagtttgggaagacgacaacattctggagacggatggtggtgatggcagcacaacaatgaatgtacttaatgccactaaactatatatttttaaattgttaaaattgtatttttaatgctgcttattttaccacaattttacttgattttatttatttatttatttttttcagagagggttttgctctgtcatccaggctagagtacagtggcacaatctcggctcactgcaacctccaccacccaggttcaagcgattctcctgcctcagccccccaagtagctgggattacaggtgtatgccagcatgcttagctaatttttgtatttttggtagaaacggagttttgccaggctgctctggaactcctgacctcaggtgatccacccatctcggcctcccaaagtgctagaattacaggcacaccatgcctgaccttattttaccacagttttaataaaaaagtatgaagtactgatatatactacaacatgaaacttaaaaacattatgctaagtgaaagaagacagtcacaaaagaccacatgttatatgattccattcatatgaactgtccagaacaaggaaatctataaagtccattagtggttgccaggagctggggtgggaaggggtacttaggggtaggggatgatagctaaaagtttctttttgaaagatgaaaatgttctaaaactgactgtggtaacagctgcaagtatctgtgattacactaaaagccactggactgtacaatttaaatgggtgaattgtatggtttgtgaactatatctcattttcttaccaaataaaaaatttgaatgtgcttctagcacaaacaattttttcccagatttaagtaagacatatttaagaggttttttcaaaggttacttaaaatgaaaaaccatcatgagtctctaggaacaagacagcaagagtcaggatctattttcccagaaggttgtctaccttagttaaaaagaacaaaaataaaagggaacccaaagttcttgttttcccaaagcaagctgtgaagcaggccgacagcgtgtagatcaaaggaaccaaaagcagccttaacctttctgttaaacttggcgtggcgcctcaactgtgtggcttatcagaatccccctgccgcgtctggtcacagccaacatgggtttctggctaccaagcaacagaacgggcattaaaacagagttaaaagccctagtttttcttccggtcacatactctggaaatctcagtcaaatgcaaaggcaaacagatgaagtactgttctaaattgtgtaacctgattcaaagtttacccccgtactgctaaagaaggaaggcagactagcttggccagaaacaagctcacaacctggaaacccttcaactgctttttattacctgtagcctctattgttcaataggttttagtgaataaattgtcaattattttttagtgacagtcaaaataaatgaagcaaggtgactggcaccaataacccaaactgtgagaaatttacctagaaaaaaagccaactaccaatgagtcaaataataatatgaccaggaacaataaaatgtggtaggaagaaatgccagaaatggtagcaaaaatgtaacagttcaatttatcatataatttgtcaaaaatatcctcccaagtaaaaccccaggagctctcaaggatttgcaagaagttttgaaaccacaaactttatcacctggcataatagctttataagtcataattagatatgagaggcatgggctggatgtggcggctcacgcctgtaatcctagcactttgggaggctgaggcgggcagatcacttgaggtcaggagttcaagaccagcctggccaacatggtgaaaccctgtctctactaaaaatacaaaaattagccgggcatggtggcacgtgcctgtaatcccagctactcaggaggctgaggcaggagaactacttgaacccgagaggcagagattgcagtgagccgagattgtgccattgcactccagcctgggggacaagaacgaaacatcatctccaataaataaatacataaataaataaataaataaataaataaatacaagagcgaaacatcatctccaataaataaataaataaatttaaatatatatatgcacacacacacacatatatatgagaggcacaagatactcaagcaaaatctcaaatacagtgacaataacacacttattccacactcaacacaatgacaggaaggaaacagaaaaaagcaggaagtacctgctggcaggaattctcacccctgccctccagacccagtggtgcacgcatcactaactgtcaacccatgattccttaaaacagaatactaagggaataacaagcagtataaagaggttcttttttttttttttttttttttttttttgagacggagtctcactctgtcacccaggctggagtgcaacagcgcgatctcggctcactgcaagctccacctcccaggttcacaccattctcctgcctcagcctcccaagtagctgggactacaggcgcccaccaccacaccgggctaatttttttgtatttttagtagagacggggtttcaccgtgttagccaggatggtctcgatctcctgacctcatgatctacctgtctcagccccccaaagtgctgggattacaggcgtgagccaccacgctggtccaaagaggttattttacataaattgttgagcaaaaatgaaatgaatcatttcagcttctcttgatagccagaaaaacaaggcaagagaaagaaataaaaggcatccaaattggaaatgaagttaaattatccctgtttgcagacaacatgatcttacatatagaaaaccctaaagaccccaccaaaaaactatgagaactaataagttcagtaagattgcaggatacaaaatcaacatacaaaaatcagtagcagtattatttctaaacgggaggctcaggtgggaagatcacttgagcccaggaggtcaaggctggagtgagctgtgatcacgccactgcatgccagctaatagcaaattatctggaatggaaatcaagaaaacaatcctgtttacaatagctaacaaaaaaaaaaagaaaagaaaaagaaagaaatttaaccaaggaggtgaaagagctctgcaatgaaaactttaaaatattgatcagagaaactgaagacacaaataaatggaacaatatcccatgttcatgtattagaagaattaatattgttaaaatgtccatactggccaagcgcgtggctgacgcctgtaatcccaacactttgggaggctgaggtgggctgatcacctgaggccaggagttcaagaccagcctcgccaacatgataaaatcctgcctctactaaaaatacaaaaattagctgggcatggtggtgggcgcctgtaatcccagctactcgggaggctgaggcaggagaatctcttgaactcaggaggcggaggtggcagtgagccaagatcacgccactgcactccagcctgggtgacagagcaagactctgtctcaaaaaaaaaaaaagaaaaaaaaaagtccatactacccaaagcaatctatacattcaatgcaatccctatcaaaataccaatgacattcttcatagaaataggaaaaccaatcctaaaatttatatgaaatcacaaaagaccccagtagccaaagcaatctggagcaaaaagaacaaagctagaggaatcacactacctaacttcaacatatactacaaagtcatagtaaccaaaacagcatggtgttggcataaaaacagacagagaccaatataacagaataaaagcccacaaattaatccacacttacagctacctgattttcaacaagtgtcaagaacacaatagggaaaaagacagtctcttcaataaacagtgttgggaaaactggatatcgcacgcacaagaatgaaattagatccttatctcacaccatatacaaaaataaactccaaaatggatcgaaaacttaaagtaagacctgaaactatgaaactgccataagaaaacatagggaaaaagcttcatgaccttggtctgagccaggaattttttttaaaagacctcaaaagcacaggcaacacaaacaaaaataaacaaataggattatagcagactaaaaagcttctgcacagcaaaggaaacaagagtgaagaaacaacctacagaatggaagaatctatttgcaaactatacatcagttaaggggataatatagaaaatatacaaggaactcacagcaaagaaaggaaaggaaaccaattaaaaaatggacaccagctactcaagaggctgaggcaagaggatcactagagcccaggaagtcaaggctgcactgtactttagcctgggtgacagagcaagaccctgtttaaaaaaaaaaaaatatatttgccctaaatggtggcgtgtgcctatattcccagcttgggaggctgacataggaggattgtttgagcctaagagtttgaggctgaagtaagctatgaatgcaccactgtactccagcctggatgacagagcaagattccatccctcaataacaaaaacaaggcaaaagacccaacagacatttatcaaaagatgacaaataaatggccagaaagccacatgtggtaggtagcacgtgcctgcagtcccaactactcgggaggttgagatgggaggatcacttgagcctgggaggttgaggctgcaaatgagctgtgattgtgctactgcactccagcctgggtgacggagcaagaccctgtctcagtaaatttaaaaaaaataaaataaatggccaacaggtatatgaaaaaatgctgaccaccactagtcattattagactgtctattttcaatgataaaagataacaaacgttgacaaggatgtggagaaaagggaacccttacacactgttgatggcaatgtaagttagtacagatatgaaaaacagtatgcagggtcctcagaaaattaaaaatagaattaccattaagatccagctcctgctcatcaaagcaagtttaaaaaaaaaaaatccaggcttggtgcagtggctcatgcgtgtaatccccgcactttggaaggctgaggcgggcagatcacctgaggtcgggaattcgagatcagcctggccaacatggtgaaactctgtctctattaaaaaaacaaaaaaattagccacgcatggtggtgtacatctgtaatcccagctatttgtgaggaggaagcacgagaatcacttgaacccgggaggcagtgttgcagtgagccgagatcacaccactgcactccagcctgggagacagagcaaggctcagtctcaaaaaaataaaaaataaataaattaattaaataaaataaaaaattaaaaatccagcaatcccattactggtaatacatccagaggaaatgaaatcagtacatcagacatctacactctcatgtatattgcagcactagtcacaaaagccatcaattgattatagaataaatgtaagtgtccatcaacagatgaataaagaaaatgtggtatatatacacagtagaatcctattaagccttataaaagcaggaaattctgtcatttgtgacaatatggatgaacctggaggacagtacttatattaagcaaagtaagtcaggcacagaaagacagtaacaatgtgatctcacttgtgtagaatctaaaaaagttgatctcatagaagttgagaatagtgcttaccagaggcgaggggaggggagacagggagaggttggccaactggtacaatattatagtcagatggaaggaataaattcaccttatacctcataaataggacaattattattattattattttttgagactgagttttgctctatcatccaggctggagtgcaatggtgcaatctcggctcaccgcaacctccgcctctcaggtttaagcggttctcatgcattagtctcctgagtagctaggattcaggctcccactaccatgcccagctaataatttttgtatttttagtacagatagggttgcaccatgttggtcagctggtctcgaactcctgacctcaagtgatccaaccgcctcggcctcccaaattgctgggataacaggcgtgagccaccgcacccgaccaatatgtacaattattacatgtcaattataaacattatgaataatgctccattgcctcagcacttacatcaaatacacaggttataaaattataaaattctggccgggcacagtggctcacgcctggaatcccagcactttgggaggcaaagacgggcagatcatctgaggtcaggagttcaagaccagcctgatcaacatggtgaaaccctgtctctactaaaaatacaaaattagccaggcgtggtggcacatgtctgtaatctcagctactcaggaggctgaggcaggagaatcgcttgaacccgggagatggaggctgcagtgagttgagatcgtaccattgcactccagcctcggcaacagagtgaaactccatctcaaaaaaaaaaagagattatttaatgcctgttacattctatagcactataaaacaagaaaaacccatgctacatgctacagtgatacaacaacttagtaggctgcccaaggtcttgaaatatgtcatctctaggccggacatggtggctcacgcctgtaatcccagcactttgggaggctgaggcgggtggatcatgaggtcaggaattcaagaccagcctggcaaacacggtgaaaccccatctctactaaaaatacaaaaattagctgggcatggtggcagacacctatagtcccaactactcaggaggctgaggcaagagaatcgcttaaacacgggaggaggaggttgcagtgagccgaaatcgggccactgtactccagcctgggcagcagagtgagactccatctcaaaaaaaaaaaaaaaaaaaaaaaaaagaaaagaaaaagaaagaaatatgccatctctaatgtcaaacatctacctatttttaattatttgggttttttcccctgtcatttttagcaacggggatattttgggattcatgtatgtgaatccgctgaatgaatgcttaggcagatgacaaacctgaggaactgtctgctccaacctgtaacacaaagatttccacctgataaattaagataagaagttacctaaccaactatattttgctgaaaagcaaaaaagccactgaaagctccgcaaactgtctacaagtcacagggtacccagtctagcacatacagggcttagtccccaaggctgagggcctggacctaggagaaaatagagcaggcagttccatgactatcatctaaaagtcaaaatgactagaaagaaaaaaaaatcacgacataaccagtgtctcaacagagaaatgatctttaagccatagggctggctacatggaaaagagaatacagcgtaatatcaaaacagctactgaatttagagcacaaggaaaataagaaaaaaaagcagatttttgaaaaatttcttctaaccatctaaaattcaaattgcagctatggctcaggtgaaaaaaacagtgctgcagtaaaacatcagcacctctacggagtaatcaggacggtattaacccccacctctctgaaaacaagaaaagccaggaggtaccattaaaagaacaggctaggccaagcacagtggctaacacctataatcaatctcaacacttcaggaggtcaaggtgaaaggattgcttcagcccaagagctggagaccagcctaggcaacataacaagactcgatctctacaatttttttttttaattggccaggcatggtggcattgagcctgtggtcccaggtacttgggaagttgaggtgggatgactgcttgagcctggaaggttggggctgcagtgagccgtgatcacgtcactgcactccagcctgggcaacacaaaaaccctgcctccaaaaaaaaaaaaagaccagtccagcccaggtggagtgctggctctgcacaaaatagctgtgcagaccttgggcaggcctccaagtctgttttcacaccataaaacaatgtagcagtatctaacagaagtttctgcgaaaattacatgagatcatatgagctgttcacttatcagcaccaattgcaaagcaaaggttaatgtttaagaggatgccagaaggaagaaaggataaagctcagtcttaagaattctactccagcacggctcagccttgacgctttgtatctggggccaggtcattctttgctgaggggcaaagctgccctgtgtactgcaggaatgtttagcagcaacactgccctctattcactagatgccagctgtactaccaccaacatggtaacaataaaaaacatgttcggccgggcatggtggatcatacctgtaatcccagcactttgggaggccgaggtgggtggatcacgagatcaggagttcaagaccagcctggccaatatggtgaaaccccgtctctactaaaaatacaaaaattagccgggcgcagtggcaggcacctgtaatcccagctacttgggaggcttaggcaggagaatcgcttgaacctgagcagcagtgatttcaatgagtcaagattgagccactgcactccaacctgggtgacagagtgagactctgtctcaaaaaaaaaaatgttcaaacattaccaaatggcgagatgcgggtacaaaatcaccccactattcctctactttttttatcattctttctgcagtttttacctatttttccttccccaaaatttgaaaaccaatttgttctctaacttgattcccaacttataatcttttccttcctctattcaaaataatttcttcctcctgatttgcctatttcagttaacagtagtgcctttttcccactcacccaggctcaaaatcttcctcgtttccaatggcctggtcctctccctatctcccaaattctctcctcctttccattctcaatgctcctgcccaaatgtatatcctcccccaacccccactacagcagcctcctctctggtctcccagcttcttgatccctctctcctctatgctatcccctaggccaccttagaaagtgtttctaaaatacaaatttcaagccgccactgtccttagcacagtccttggaacacagcatgcctctgcctacccttcccacctaggaggtccttccaccaggcatggtcagaagtactccctcccactttctcataaagtgcttgcatcccttctagcccacgctgactcccagtcaatactcgacaaaaagagtactaggcacattaagatgtgtaaatacattacgaaagacacggaaattacgatctcattgtggaaaactaaagataagggttgtgccccaccacgcagcagaacgaggagattccctgccactgacagagaatggagagatcctggaaggacgctagacaggctgacggggctccactggaggggaaaacaggaaggagaacgtgggcatcactgaaagcaatatatgacagataacagaagaagtgcttttattattattattatctaaattctactcctagctgggtgcagtggcacacacctgtagtcccagctaatgaggagggtgaggtgggatgatcgcttgagcccaggaattccaggctgcagttgagctatgatcccacaaatgcactccagactgggcaacaagagcaagaccctgtctcaaaaagaaagaaagaaaagaaataccactcaaccttctggtttccagtccagtatgtgtaagaagcttagaagtcgccacctgatcctaacaacatgtaaaaagctaaatcaactgaaaaatcaactcttaaagaaataaggtggctgggcgcagaggctcacgcctgtaatcccagcactttgggaggccaaggcgggaggatcacgaggtcaggagatcgagaccatcctggctaacacggtgaaactccgtctctactaaaaatacaaaaaattagcctggcgtggtggcgggcgcctgtagtcccagccacttgggaggctgaggcaagagaatggcgtgaacctgggaggcggagcttgcagtgagccaagatcatgccactgcactccagcctgggtgaccgcaaggctctgtctcaaaaaaaaagaaatgaggttaagggggaaactgctgcctcccaaattggacagacagaccggcagatacagagaatcacagtttactggagcaaaatcctccaccaaatcagcactagggtaggaaaaccttaactataactaacaaattgccggaggctcagtgtggacaactgtgagagtttaaaactccaggagacccaattactggggagccccattctttgacgagttttacctccaggagctctacgagttccttacagtgaaaactgagggggggaaaaaatcccttcatgcttccagcagagggaggggcaaagaaacctttccttttttcttttcctttttttttttttttttttttgagacagagtctcgctctgtcccccaggcaggagtgcagtggcgcgatctcggctcacagcaagctccacctcccgggttcacaccattctcctgcctcagcctcccgagtagctgggactacaggcgcccgccaccacactgggctaattttttgtatttttagtagagacggagtttcaccgtgttagccaggatggtctcgatctcctgacctcgtgatcctcccgcctcaggctcccaaagtgctgggattacaggcgtgagccaccgagcccggcctcttatatttttaaatacgacagaacattctgttcttaacaaggtctgccctcaggagaaattattttgccagtgtctaacctgttgggattttctcagagcctaaacttcctgagagagggcaaatacacaattccagccccctctggccattctgtcccacctaagcggggaggagaactaagaaaaatgggtaaagttcacagtctaggtgcacaggctcaccaaaagactgagacctcaccataggactataggttaaacattcaaaaatcaacaataggctggatgtggtggctcgtgcctgtagtccagcacctggggaggccaaggcaggtggaccacttgaggtcaggagttcaagaccagcctggccaacatggtgaaaccctgtctgtactgaaaatacaaaaattagctgaatgtgatggtgcacacctgtaatcccagctactcgggtgactgaggcatgagaattgcttgaatccagggagtagaggttgcagtgagccgaggtcacgccactgcactccagtgtgggtgacagagcgagactctgtctcaaaataaaaaataaaaaataaaatcaattaatataatctatcacatcaacaggctaaagaagaaaaatcacatgatcatatcaatagatggagaaaaactatctgacaaaatccaacacccactcatggtaaataataaactctcagaaaatgaggaatagagaggaacttcctcaacttgataaagaacatctataaaaaacctacagctaacattatacttgatgagaaagtcacagcttttctacgaagaacaggaacaaggtaacaatgttccccctcaccacttttttccaacatcataggaagtcctaactaataagaaaaggaaattaaaagtatacagattaggaagagagaaataaaactttgtagatgatatgattatctatgtagaaaatcagaaagaagtgaaaaaaaatttctggaataagagattatatagcaggactgcaagatacaaggttaatacataaaagtcaaccagtttcctacataccagtgacaaataagtggaatttgaaattaaaagcacattaccatttatatgagcacccccaaaaatgaaatacttatatataaatctaacaaaatgtgtattttgttatgtcactcaatgtgtattgagtcatgggtaggaagactcaatattatcaagatgtcggttcttcccaacttgatctgtagatttaatgcaatcccaatgaaaaccccagcaagttattttgtgaataccaacgaactgattctaaaatttacagggaagccaggcacagtggctcatgcttgtaatcccagcaatttgggaggccaaggtgggcagatcacttatggtcaggagttccgagaccagcctggcaaacatggtgaaaccctgtctctactaaaaatacaaaattagctgggcgtggtggcatgcacctataatcccagctactcgggaggctgaggcaggagaatcgcttgaatccaggaggcggaggttgcagtgagctgggatcacgccactgcactccagcctgggcaacagaatgagactccatctcaaaaaaaaaaaaaatgataataataataaagtttatcaggagaggcaaaaaacctagaatagccaatgaagaataaagtcagaggaccgacaatactcaacctcaagaatcattatgaagctacattaattaggccaggcgcggtggctcatgcctctaatcccagcactttgggaggccgagctgggcagattacctgaggtcaggagttcgagaccagcctggccaacatggtgaaaccctgtctctactaaaaatacaaaaattagctgggcgtggtggtgggcgcctgtaaccccagctactggggaagttgaggcaggaaaattgcttgaacctgggaggcagaggttgcagtgagccgagatcgtgccattgcactccagcctgggcaacaaaagccaaactccatctcaagaaaaaaaaaaaaaatgagccaggtatggtggtacacacctgtaatcccagctactcaggaggctgaggcatgagaatcacttgaacccgggagacagaggttgcagtgagccaagatcatgccattgtactccagccaagacactatctcaaaaaataaaaataaaaaagctacattaattaaaacagtgtggtattggcaaaagaaaggacaaatggatcaatggaacagactagagagtacagaaatacactcacatagtcaacagatctttcacaaaggagcaaaggcaatacaatgtaacaaatgtcttttacaacaaaccatttgttgtttcaacaaatggtcctggaacatgcccggagcggtagctcacacctgtaatcccagcactttgggaggctgaggcgggtggatcacttgaggtcaggagtttgagaccagcctgaccaacatgaagaaaccccgtctctactaaaaatacaaaattagccaggcgtggtgacgcatgcctgtaatcccagctactcaggaggctgaggcaggagaatcgcttgaacctgggaggtggaggttgcggtgagccgagatcacgccattgcattccagcctgggcaacaacagcaaaactccgtctcaaaaaaaaaaaaaaaaaaaaaaaaagtcctggaacaacgggacgtccacatgcaaaaaaaaatctagacagacgttacacttcccaaaaattaaatcaaaatggatcataaagctaaatataaaatgcaaaactagataatttcttgatggtaacatagaagaaaatctagatgaccttaggtatggtgattgcttttatttatttatttactttttttgagacggagtctcactcttgtcgcaacagtctggagtgcagtgccgcaatccaggctcactgcaacctccgcctcccgggttcaagcgattcttcctgccttagcctcctgagtagctggcattacaggtgcccacgactacaccagactaatttttttgtatttctagaagagacagagtttcaccatgttggccaggctggtctcaaactcctgacctcaggtgatccacccatcttgtcctccccaagtgctggaattacaggcataagccactgcgcccagccagattacttttagatacagcatcaaaagcatgatccatgaaagaaataattgataggccagacttcattaaaattaaaaactgctttgcaaaagatactgtcaagagaatgaaaagtcacaaacaaggaaaaaatatttgcaaaagacacatttgataaaggactgttaacaaaaatatataaagaactcttaaaactcaagaataggaaaacactttcccactcaagaaggtgtggcaggtgcctggcacggtggttcatgcctgtaatcccagcacttcgggaggccgaggcaggaggatcacgaggtcaggagatcaagaccatcctggctaacacagtgaaaccccatctctactaaaaatacaaaaaattagccgggcgtggtggcagccgcctgtagtcccagctactcgggaggctgaggcaggaaaatggcgtgaaaccgggagacggagcttgcagtgagccaagatcgcaccactgcactctagcctgggcaacagagcaagactccgtctcaaaaaaaaaaaaaaaaaaaaaaaaaaaaagaagctgtggcaggaaaaaaaaaaacaattaaattaaaattttaaaatgggcaagaagctctgtggcatgcccctatagtcccagatacttgggagactgaggcaggaggaccacatctgtgaatacccactacactcaagcctgagcaatgtagcaagacccagtttcttaaaaaaataaaaaggaaaaagaaaaagacacaaactgacatctcatcaaagaagatatacagatagcaaataagcatctgaaaagattttcatcatatgtcattagaaagttgcaaattaaaataagatacctgactgggcgcggtggttcacgcctgtaatcccagcactttgggaggccgaggtgggcagatcacgtgggtcaggagttccagaccagcctgtccaacacagtgaaacccacctctactaaaaatacaaaaaattagccgggcatggtggcaggcgcctgtaatcccagctactcaggaggctgaggcagagaactgcttgaacccgggaggcggaggttgcagtgagccaagatcacaccactgcgctccagcctgggcaaaagagcaagactctgtctcaaaacaaaaacaaaaaacagccaggcgcgatggctcatgcctgtaatcccagcactttgggaggccgaggcaggtggatcacctgaggttaggagttcaagaccagcctggccaacatggtgaaaccccatctctaaataccaaaaattagctaggcgtagtggcaggtgcctgtaatctcaagaactcaggaggcagagacaggagaatcgcttgaacccaggaagcggaggttgcagcaagccgagatcgcgccattgcactccagcctgggcaacaagagtgaaactctgtctcaaaaaaaaaaggaaagaaaaagaaaatgagagaccattatacgcctaccagaatgaccaaacaccagaatgctgacaccaccaaatgctagtaaggacatagaataacaggaaatctcattcactgctggtaggaatgcaaaatgttacagctactctggaagacagtttggcagttccttacaaaactaaacgtaactctcaccatatgaccagcaatcatgctcctaagtatttacccaaatgaattgaaaacctacacacaaatgtttagagcaactttattcataattgccaaaaccgtgaagtaacccagatgtccttcagtagatgaatggataaataaactgtggtatatccagatgacagaatactactgagtattaaaaagaagtgagttatcaagccatgaaaagacacagggaggctgggcacaggggctcacccctgtaattccaacaccttgggaggccaaggcaggcagatgacaaggtcaggagttcgagaccagcctggtcaatatggtgaaaccctgtctctactaaaaatacaaaaaattagccaggcggggtggcacatgcctgtaattccagctacttgggaggctgaggaaggagaattgcctgaacccggaaggcggaggttgcagtgagccaagatcgcaccattgcactccagcctcggcgacagagcgagactctgtctcgggaaaaaaaaaaaaaagaagaagaaaagacaagacaagacccagggaaactcagtgcatattatcaagtgaaaaaagccaaactgaaaagacttacatactgtgtgattccaattctatgacattctggaaaaggaaaacctatggagactgtaaaaagaccagtgattggctgggcttaggagggaaagagggataaacagacattaagtagaggatttctagggcagtgaaactattctgtatgacactacagatggtctccaacttatgatggttcaacttatgatttttcgactatacaatggtacaaaggtgatatgtattcggaagaaaccatacttcaagtaaacatacaaccattttatttttcattttcagtaatcaataaattacatgaaatatttaacactttattataaaaacagactttctgttagattactttgcccaactgtaagctaatgtgtaagtgttctggcaaattaaaggtaggctaggctaagatatgctgttcagtagattcaatgtattaaatgcatttcaatttatgatggtttatcagggcataaccctgttgaagtaagctcatcatgtaaagcagcatcaatacaatggtggatacatgtcattatacggtggccaaaaaccacagaatgtacaacagcaagaataggatgtagtgtgttatggactctgagtgataatatgtcaatgtaggttcctcagttgtaacaaatgtcccattctggtgggggaagttgagaaaggggaaggcagtgcctgtgtgcaggcagggggttatatgggaactctctgtactatctgctcaattttgctgtgaacctaaaactgctctaaaactgggcacagtggcacacacttgtaatcccagctactaaggtggctgaggcaggagggaccacttgagcccaggagttcaagaccagcctgggtaacacagtgaaatcccccatttctaaacaaacaaatacaagttgctctaaaaaatatagtgtattagtttaaaaaggaagaaagaaaaagaaagccagcaagccagccacccaaggaacaaaactttccagtaaaaacaaagtgtaaataaaattgtatcttgaaaaatgaaattgaaaattgtttctgttcttatatgtaacataatttaggttataatacaactacatatttatgtttaatttgaaaagcaaacgtttaaaatgaaaagtagggagtttgggcacaatttttccaaaaaaattatgatggcaccataagacacaattaacttcctatgtgagttttactgcattaattttacagtatctgaggacttggccagtcttttcatgggactctctccatcttttgatatgattctattttgcagggcccaaggtagcatcctcctcaatggttttcttttcactgttagtgggtctgtggaacgtaatgtcaaaagatgtgtgtgaaacttagtctccaacatttcattcattgaacttcatgaaatcttgtatccttcacaagattttaaacttcatttcacaactgctgtgaccttatcaatcagcaatgaaaataacaaactctaagctgggtgtggtggtttacgcctgtaatccctgctctttgggcggaggcaggcggatcacctgagcccaggagttctataccagcctgggcaccatggtaaaaccccgtggctaccaaaaaatacaaaaattagccaggtagccaggcgtggtggctcatgcctgtaatcccagcactatgggaggccaaagcaggcggatcatgaggtcaggagttcaagaccagcctggccaacatgtgaaaccttgtatctactaaagataccaaaaaaaaaaaatttagctggacatggcatgtgactgtaatcccagctactcgggaggccgaggcaggagaatcgcttgaacctgggaggcagaggttgcagtgagccgagatcgcgccattgtgctcccgcctgggcaacagagcaagactgtcttaaaaaaaaaaaaagaaagaaagaaagaaaatgctaataacatactattgatttgataggcagggacagaagttagtattaagttgtgatgtctggaaatgaacaaattttctaagtggtcagctcattaacaacaactctcatgttaggacaatttttatttttccctataccactcatagttgaagagactcagacaaggatctccgttcatcacacagcaaagaggccaacttaagctaaaaatgacaatttctacacttatccagttccggtgtgccaggcactatcctagtgctggagatacaaagatgaacgtgaaatgccctctaggaattcaatctaacaagagaatggaatgaataaacacacacacaaacgtgttaagggttgtgataacaaggcctgcatgtacaaagtgctaaggatgagacacagaggggaaagaaattcagtatgtctggttctctctgagttaagccttgaaagaggaattttaaaggaaacacaccaagggaaaggctgccaagcagagggtaggggcaaagaaaggcctggaaactgaaaacacaaagctcattcagaaaatgcaggctccagtgtaactagctcaatgttagttgctgtggttctggagaaggagtgattttaaaacagtaataacaaaaagaaccagtctaaaaagttaggccgggcagggtgcagtggctaacgcctgtaatcccagcactttgggaggccaaggagggtggaacacctgaggtcaggagttcgagaccagcctggtcaatatggtgaaaccctatctctaccaaaaatacaaaaattagccggatgtggtggtgcatctgtagtcccagctactcgggaggctgaggcacaagaatcgctcgaacccaggaggcagaagttgcagctagccgagatcacaccagcctgggtgacagagcaagactccatctcaaaaaataaatttaaaaataaaaaataaaaaggtaggccaaggctcaagtttagaccatgcaaacaagtttggattttattttccaatatttgagaaatccatagcaacaagatacagaatggattagaaggaacacacaaaatgcaagaagatcctaaggcacctcctgttctagtgtctaagcaaggacagcaaagggaccagacagaaggtggggatacaaaagtagctcatcaggtttgagttacaactgtgtgcagaggagggatttctgggggaatgcagagttagaaatgatcctggggctctggccaggctgctgctacaaacgcagagcgaaagcagaagcacattcctgggtggggaggagccaaagggttaaatttggaataggaatgcactgagttgaggtggtgaagtctcatcaactactgcagatgcactggcactcagtgaaacacggagctccagaaacggatcggggccaggtatggtggctcaggtctaaaatcctggcactttgggaggctgaagcggaaggactgcttgagctcaggagttcaagaccagcctgggcaacatggcgaaaccccatctctacaaaaatacaaaaattagccagtaatggtggtgcgtgcctgtagtcccagctacttgagaggctgaggtgggaggatcaccagagcctgggaagtcgaggctacagtgagctgtgatcacaccactgcactccagcctgcgcgacagagtgaaaccctgtctccaaaaaaaaaccaaaaaccagaatcagattgggaaatgtcagtaaaatttgatagctggagccataataactgcaactgcctatggagaatcactgaatttcaaccagacgaattcctctccttctccgcacctccaaatgcccttgtgtcttttttaaaagctagacatcacccactttcccatgtcctaaatcacctttttttctccttattaaacttattccataactacgttctctttcagaacacaggactgagagagtgtactcttgcaacattatgtaaaaaggtcatccaatccaaaaggaaagctgtgttttccaagactgctaactcctggagaaaagaaacaagacatcctcaatgctttcctaataactggtttgagcaaaatgcaaaagtttaactgctgagtgactctccctggagaaagccatgaaaatatcttaaggctggatctagggtgtccaaacattttcacaggccgcaggctagagcactggtgcaggagaaggggacaccagagacctggcagttcaggctttgaaggcagtaaacagccactgacctcaggcaagtcacttctcctttaggttttccatttcacagactgatgagtacatggcctaaaatgatcgcccttctagttgagaattttcaggcctaactaaaagtagattaaagtaaaccttggagagagctgaattttttttaagtgccattaagcaattcagggattatctaaacagcctcggttttcttttctctgcttccttaccaactgcctattaactctcactcttagctcataagcagtcagaggggctgaagcacaaagaggaagtgaagctcaaagagttaattttgctgcattagcggctctggtgaaagacagtgggcacagaaaaggaatcaaatgaccaaaactggacttggggattactggtggcagccagccagcaaatttctagatactgcacacaacctgtcagccaattaaaagaaaattggcagaaaatgacggaacacgttctttgtttttgtttttttgagacagtctctctctgtcaaaggctggagtgcagtggcgtgatctcggctcactgcaaccgccgcctcccaggttcaagcgattctcctgcctcagcctcccaagtagctgggactacaggtgtgcgccaccatgcccagctaatttttgtatttttagtagatatggggtttcaccatgttggccaggctggtctcgatctcccgacctcgtgacccgcccaccttggcctcccaaagtgctgggattacaggcgtgagccactgcgcccggcccgggaacacatctttaaaggtctcaatagaaggatgcacacactacgttgaatggttatgtcttcggagcagagtggtgaaagaaggtcagacttctgttaagtctgaatacctacacgcgtacttctgtaattcaaatttaagattaaatattttcaagtttaaaaaaaggaaaaaatggccgagcgcggtggctcatgcctgtaatcccaacattttgggaggtcgaagcgggtggatcacctgaggtcgggagttcaagatcagcctaacgaacatggagaaaccttgtctctactaaaaatacaaaattagccgggcgtggtggcgtgtgtctgtaatcccagctactcgggaggctgaggcaaggagaatcgcttgaacacgggaggccgtggttgcagtgagccgaggtcgcgccactgcactccagcctggggaccaagagcgaaactccgtctcaaaaaaaaaaaaaaaaggaaaaaacatttctaccttactcttattttaggagccacgcctcccacctttgtctagtaacacagctatagtgatgtctcttaggggatgagaaaatgctactcctccactaacaatgactcttggagagggaacaagacatcaaatcgcgaactcgaaaaactaacagaaaaaagttaaaaagtggtttgtgtttttaaagccagccacaacaccttcattcaaggccctaaaccgcagagactttctagacctatcttaagcgtcagtaccacacgcacttcgtgatggaacggtattgttctcctagaacagacccgttttctcatgaaaccgacgtttttacaaaagcctgtttgtggacggcctgcggcggccgcgaacccgcttcccttggattacccagggctgggagaaggagggctttcgccggctgcggtccccggtccccggcctccgccccggccccggctcccccggcccccgacccccccggcccacgccccctgcccggaccccgccccggccccgccccgcgtcacctgactgtcccgcggcccccagacccggcgccaccgacctgatgacactgatgtggaactcgtcctcgcggaggccccgccaggcgccgggcaggaactccttgcaccacagataggccctgcgccgcgtccggggctccggctgctcgtctgcgggcggctgcggcggcgggggctggggcagcggcagcggcagcggcagcggcggcggagggggcagcgcgagcggcggctgttggccgcccagctgcttggactcgaggtcgctggcggcgtcgcgctgctgccccacgccgggcgccggggccgcgctgccgctaccgcagctcagcagcagcccgagcggcgagggctccgcctcgcccccggtgcagaatttggttttcatgcccgacaggcggccgaggaggcgcgggcggccgcagcgcgagaggactaggctcagagtccggccgggcgccccctcgccgctctctcactggcaggccggcggggcagggggccgcggcggttgggcgcgcggggcggcggcggcggctgcggcgactgcggcgactgtggagcggggatgtgctgctggccgctgcactcgctcctctgccgccgccgcacgaggagcgccggccgcgtcacagcccgccctcgcgctcgccactgattggccgccgtccgccggcccggcgcatcataaccgccgccgccctcgccacaccgcctccccattggctgcggcgccgcccccaacccagagcgctgcggcctccgtgagcggggcctgggcgaagggggcggggcgtcgagggggcgccccggcggtcgcagggaagggggagaggggagcgaggcgcggggggcgccgggagagcgcctccgcggtgggacggagccggactgggccgagcgagggaggctcctgagcctcggaggaccccggggttggctttgggagctgaaagtttccttggacccctcggaagccccgtgacatcagaggccgggcctggcaggggcaggcaggaaacgtgtctggaggctactgccctctccgcgtgaccttgggcgagcagcctcctcctggggctcagtgggtgtgattttgtaacatttcccagcgctgccacaggcgcgtctcgccctgtccaacgcggagcccgaagaattactaagaaaccgaggtctgaaggagggaagaggtgacgggctcgaggccacacggtgggccaggctgggcccggctgcacgccggctaccggggcccagccctctgcacgcctcccgcagcctcagtttccctgtccgtggtactgaggatgctcgggcctagaagttcagggctggaggcccagggaccgtcgagggaggggcatcatccccgccatggggccgccgcaactgcccagagcacaggccaaaggtgcgtgccacggggctactggcgttgtggacgctgcccctgcctccccatcccccgcaggaaacagccttgtgaccgtgactaacgcacctttgccggggtagaggggcaagggcccctgctaccgtttgccacacactgccccatgtccctcactgctcccgtccttcctagaagtgaggtgctgatacatataaaaattatggatcccattttatgggacatgagctgaaacaggaggtttcctgggctgccaggggcttaggaaatccagtgcctgatacacaggaaatgcttctatgtggggagttcacagtcttccagaagcaaaaatgttttttggttttttttttgagacggagtcttgctcagtcgcccaggctggagtgcagtggcacgatctcggctcactgcaacctccgcctcccgggttcacgccattctgctgcctcagcctcccgagtagctaggactacagacgcccgccacgacgcctggctaattttttttttttttttttttttttttttgtatttttagtagagacggggtttcatcgtgttagccaggatggtctcgatctcctgacctcgtgatccgcccgcctcggcctcccaaagtgctgggattacaggagtgagccaccgcgcccggccgcaaaaatcttttagagtgtgtacttggctgaacttgctccacgcaaaatggtcttatttaaggataaaaatgaaaggggacttttgtaaggctgctgtggcgacaggcctggaagttgacctgcagggaggtaggagagaccaaggcccctgggacggaggccggccactggatgtttgaaaggctgagaagccaagggcttcaatctggggaggccgtttggataaaggagccaaggactttctctaaaaataccggctcacagggaggtggggccatgccaatggcctgcccaggtgacaagccctttgtcccactgtcccctggcaccagtctggtaatctcaaaggaatgccagaaatctggccaggaggaagggacactaaagtaaggagtggccctctataatttgaaataactctttctggcatctgctggcttttgttaggaaaagcctcagacatttttatgggatcacagttccctgtgggaggaagaggttgcctcaaggccaggcatggtggcttatggctgtaatcccagcactttgggaggccaaggcaggaggatcacttgagccaggagtttgagaccagcctggccaacataacaagactctgtctcgccgggcgaggtggctcatgcctgtaaccccagcactttgggaggccgaggtgggcggatcacaaggtcaggagttcgagaccattccggctaacacggtgaaaccccatctctactaaaaatacaaaaaaaattagccgggcgtaggtggtgcatgcctgtagtcccagctactcgggaggctgaggcaggagaatggcataaaacccaggaagcggaggttgcagtgagccgagatcgcgccactgcactacagactgggagacagagcgagactccgtctcaaaaaaaaaaaaagactgtctcaaaaattaaaaatgaaaaaaaaaattaacagagcattgtgtcttacacttgtccgactacttgggaggctcagccaggagcatcacttgagcctgggaggtcaaggcacccactgcactccagcctgagtgacagagtgagaccgtatttgctgaatgaatgaatcagtgagctcctggctcagcaattattaacttatgactttgggctgagcctcggtttcctcaactataaaatggggattataataccccgagcatccaggattgagagaatgtatgcaaaatgcatagcatgcaagaagtaaccgtttggttgcgtgcagtgcattgcatggcgttgcctctgccagtggttggttttcggagatgaataatgcatgcacttgtagcatttcacagcttgggaagacagtgtcgtataagaaaagaatttgggccgggtgtagtagcttatgcctgtaatcccagcactgtgggaggccaaggtgggaggtttgcttgaggccaggagttcaagatgagcctgggcaacaagtgagaccctgtctctacaaaaaataaaataattggccaggcacagtgacatgtgcctgtaatctcagttacttagaagccggaggtgggaggatcccttgaacccaggagttcaaggctgcagtgagccatgatcacgccactgctctccagcctgggcaacagaggctaggaaaataaaaatacattttaaacaaaaataattcaaacactctgataaccaaaatgtcaatgtctgtgcacaagtagacgagtttgagagaaacttgctatggcaggtaattggaggttgttccaattaccaaaccttttcctctaggataagataaaaaaattatccaaaagctctgtgattgatgctgaattctgagagcagactcagagggtgggtgatgggccttaggagggatagaggaaagattgggaagttcccgtccactctgaatttcctgctgatgggttcctcggggtccacccacgggcctcagccctgccaccaactccaaggcctgttctgagaaagggctttgtgagtctgactccccccaagatgggggaacccactgtcaagcacctggtaggagcaggctttgagccctttcaaagatgctgcatacagcaagttccctaagcagcagtgaggtgagtgtcattagcacttcatctcccaggtggcaagggagcttcccaggggataaaaccattcgttaaaggccagcaggacctgggactccacccaggaccccatccaggggagccttgtccttctgtccttctgcaccataagcacctttggcccaggaagcactagacatttggcacagtgggggttccctcacgggctggagaagcagagccctggcaaggctgtgctcacacctcctcccaggtcacacccaggaccaagcacccctgctccagttctgagccttaaaatattgatgagagcacagaggccacctggctgcaatcctccatgttgaagattgggttgcagtgccagctagcagagtgacatggagctgggctttccctgagtgctgagcgtggccccagcccagctctgtcagcgaaaggctgtgtaggtccagcagctttctggaggtctctgagcacaagtgtggtctgacttggactgacccttctaccatacatttggctcagcacccgcagccagagtctagggcccacagggctcagaggaagcaggtgactagaatatccatctgtctggtgggtggggcaggcattcctcctgtcctcatttgcagggattttgagtataatattatgggtaaaaattctggccaggtgcagtggctcacgcctgtaatcccaacactttgagaggccaaggtggatcacctgggtcaggagttcgagaccagcctggccaacacggtgaaaccccgtctctactaaaaatacaaaaattagccaggcatggtggcacatgtctatagttccagctactcgggaggctgaggaaggagaatcacttgaacctaggaggtggaggttgcagtgagccgagatcatgccactgcactccagtctgggcaataaaagcaagactccataacgcgcgcgcgcacacacacacacacacacacacacacacacacacacacaatctttagaggtcatgctgccacccactgtgtgaccttggacagaacatctacctttctaagccactttcctcatccccaaatggagtcctactctacagggctgttggggagattcaccgaaaccagcaaggaaagagctgggtgtagagccaaagccccacaaagggtatctatgcttttcagcttattgttagctggattcccagagcctggcagagagcagcaaatacccattcatcctaagtgccagtggaagcgcaaagcctgcaggagctctggcaggtctaacagggcctggagagttttccattctttgaagctcctggcacattcaaaaattaagaaaaatctaggcgggacacggtggctcacgcctgtaatcccagcactttgggaggctgaggtgggcagatcacctgaggtcaggagcaagactccatctctaaaaaaaaaaaaagaaacatctcgacagggttaccaaaactggggcatgtttgaaatacttaaattgaacaaatcagtgcttttaacacacatgcaaaagtcccattcaagataattttgcaattctcaaggtaatagagggattactttaaaataataatggagccaaccaagcatagtgacacctgcctgtggtccaagctactggggaagctgaggcaggaggatcacttgagcccaggggattgaggctgtagagacatgattgagccactgactccagcctgggtgacagagtgagatactgtcaataataataataataatggtttgtagagcaccttaagtggtatggtgtgacaaacatctttcaggcctgacaacagatctctgtactaatctgattatccttattcagatgtatctaaatctgaggcccttggggcacatgattgcctcctggggctgccatagtagaccctggcaatgacctagtgaccgttcctctactggagatgatcccctgggcccctcagaatgcatttcctgtgtccacatagccggtgttttaagtcaggtgatctttttttttttttttttttttttgagacgaggcctctctcgttgcccaggctggaatgcagtggtgcaatctcggctcactgaaacttcttcctcatgggttcaagtgactggcctgcctcagtctcccaagtagctgggattacaggtgtgcaccacaacgcccggctaattttggtatttttagtagagatggggttttgccatgttggccaggctagtctcgatatctgcccacctcagcttcccaaagtgctggaattacaggcatgagccaccgtcgccagtcttaagtcaggcaatctaagctccctttccaagtttgttgaaaacctgatttgaggttttgtgctttaagcttgcattacatttgtaacacaataaatgcaatttttggcacaataaatgcaaaattgtggcgcagtgactcatacgtgtaatcctagcactttgggaggccgaggcaggtggatcacctgaggtcaggagttcaagacaagcctggccaacagggcgaaaccctgtctctactaaaaatacaaaaattagctgggcatcgtggcaggtgtctataatcccagctatttaacaggctgaggcaggagaatcacttgaacctggagggcagaggttgcagtgagccaagattgcgccactttactccagcctgggcaaaagagccaaactctgtctccaaaaaacaaacaaacaaaatagaaaataaatacaatttttaaaaagaccccagtcatcatgcaggttacactgtggggataacacttctgggctaggagttgggcaacctgggttcaggcaccgcaccccctctgccggctgcacagggcccctctcccctcagtcagccctgggccctgcaggctggacttttgcctggtagctttgggctggccctcccttctgcaggggaccccttgtacagatgggtaagcagaggcacaggggcacaggcaggacagcggctctgctcacgcaggatgccatggccagtcgtgggcctactccatccttgatcctcccctcccaagggcacttgccatccaggcctgaatggcaagaggcccctaaggggcccccagtcctgtcggcaccccctttgagtgactgacagggaggcaggggagctggcagcccccatccccacaccagcttgtggaagctaccagcgatcggtggggccccactggcagcccgtccgtgtagccttggccgggcccccaagcttcttagaatgccatctaagaaggcagagggggatgagcggcggcggggaggaggggcaggccttgggaagatccactgggtcacagggaagcgaaggcggaccctcctcccccagcgctactgcccgggccgaattccaaggccagcggctgcccgctgagaaggaatccggaccaacgggattctggcttccctctggcccctcctggcgagagcggcgccgggaggagggggcctcagaaggggcgggcaggggcggggcccgcggggtaggcggagctcccaggaaaacagcgggcggggcctcgcgcgaggggcggggttggcggcgaggcgtcccaggacccccattcctccctccgccccggggcttctggggagcggcgcagcttgactgccaccgactgcgggcctccctgccctacaagcccccacccccgcccccccttgggacctggcgaggagttgccccgcaaagttggggctggtgcggggttaaggggattacaattttcctaggacttagtgtgctgaagctgcttttgcgattagaatttatatttacaatgctgataacaataaactacccaggctaccgcgccacgtggacgggggtggtggatggaaagggaaacccttggccaccagcagcctgtgataaggccaaggttccctggctggattgctgcctaggatgcctgtggtccctacccccgcccgggaggcaggattgactaatccgaccaagcaaggcctccaggctgggccaagaaccccttcccagtcctctcccaaagtctatgtccttgggctcacgctgtcctctcctgtccttgcctcctgcatctacagacccctgaggccccctcctccttcagagcatgcacgtcgcaaattctcaatgactgtttggaggaatgaataaatgaattgtgaacaaatggtctgaagattccagaggtagcctaatggggccctgctgcttgagttctaatcccagccccaccagttgttggctatttggccctgggcaggtgattattctctctttgcctctgtaccttgcccgtaaaatgaggagaataccagtacctactgcataaggttgttaaaggattaaatgagtgaatagttacaaagagcctggaacagagtgttcaaagaaacacacagccacagtattaaaaaaattaaaaacccatttctctccaggcttctgccatcactctgtgtgacttcaacattctacctgcatgacctatgcagcacctggccgctgttaccttgccaccctcactgacatcttctctgcataggccttccaccatgccctgtactttctccccactagaaatagccctggctctgaaatgtgttttaatcatcccactttgggtccaccagttcctagcctttgagcttaggcctctcctccaggaccctccctggctacgatttcccaacccctctcgaccttccattcactgaccttgccactttcttgcctcttgtctgcacctctccccatccctagtgtggattccatccccttgtgaacgctgccacccgtcctggcagagactcagtacttccactctctgaatgcatttcttcttcctaggcacaccagaagactacatttcctagccccccacccccttgcagtgtctgggaccatgtgactccttaattaggtcacttctctctcctgggaggccctctctgccctctctaagtctaactagtggcaaaggatctaagggaagaaacctggcagagttactagtcccaagaagcctgggtccctgaatcaccacatggaagtctacgcgcccaccacctgaatggactaaggtatgaacagaagtaatacacacccctttagggccaaggaggtgaaacagctggtatgccttcctcacactctcctctgctttcctggtgacctaggaagctgcaggatgaagacaacagcatcacaaggaggaagccaggatccctgtgttaccacaaggaggagagatgcctaaccaagaccgtctgcaaggattttgtgtgagccagaagcagagctgtatggtgttcagccactgagatttgagggctgtttgttacagcagttgacctatcctgactgacacatcacatcattcctttccccaccatgtgtctaacatgctaccaaattgaattttaagtaaattagtacttataaattaagtacaaatgcttttcaaattcacatgaatctttggtaaataaaactggttgtaaaattattgataaatatagaaatgtctgaaattattgataaaatagccttgtgcaagtaagactaatttaagatcattggttcaatgaaaataactgaatcttctgagttgtcggcaaaatgctcatgtgtttaagattcttagataggtgttcacttaatattcagactttaaaaatgattaaccaggatataactttgaccagcctagtatcatagtttttataagtaatcctgggccgggcacgatggctcatgcctgtaatcccagaactttggaaggccaaggtgggtggctcatgaggtcaggagatggagaccatcctggccaacatggtgaaactccatctctactaaaaaaacaaaaaattagccaggcgtggtggcacgtgcctgtagtcccagctactcgggaggctgaggcaggggaatcacttgaacctcggaggtggaggttacattgagccgagatcttgccactgcactccagcctgggtgacagagtgagactccatctcaaaaaaaaaaaaaaaaaaaaagaattgtggaatcctgctgggcatggtgactcatgcctgtaatcccacactttgggaggccaacgcaggtggatcacttgagatcaggaatttgagaccagcctggccaacatggtaaaacctcatctctacccaaagcacacaaaaaattagccaggcatggtggcagacacctgtaatcccagctactcgggaggctgaggcatgagaattgcttgaacctgggaggtggaagttgcagtgagccaagtttgcaccactgcactccagcctgggcaacacagcgagactccatgtcaaaaacaacaaacaaacgaacaaaaagaattgtggaatgctgctcatccataaaatgctaatatctaatgggcatttcaggatttcttgctttctagatttatataaaatgtgccaaagatgtgttcttattgagaaaaagaagaattttgtctaattcagaagttatctgcccagacgcagtggctcatgcctgtaaacccagcactttgggaggccaagttgggtggattacttcaggtcaggagttcaagaccagcctggccaacatggtgaaacacatctctactaaaaataccaaaaaaaaaaagttatctaaaagtcaattcaaattatggagttaaaagtggttcttggccagacgcagtggctcacacctgtaatcccagcactttgggaggccaaggcaggtggatcacctgaggtcaggagtttgagaccagcctgagcaacatggtgaaaccccatctctactaaaaatacaaaaattagctgggtgtggtggtgggcgcctgtaattccagctactcaggaggctgaggcaggagaatctcttgaactggggaggcagaggttgcagtgagctgagatcatgccattgcactccagcctgggcgacaagagtgaaactccatctcaaaaaaaaaaaaaaaaaaaggtccttaaacaaggttgaaagaaaccattaagtaggggagagagagatgtgaaaaaaattatggatacaaagatgtatttttggcaaagaagcttataaagaaaagacaatacctttatatgagaaaggatcttgtatggaaaattattgtcctagagtagaatgactggttatttaagaaagaggaaggccagatgtggtggctcacacctgtaatcccaaaactttgggaggctgaggcagggggatcatttgagctcaggagtttgagaccagcctggggaacatggtgaaacactgtctccccaaaaatataaaacttagctgggcatggcagcatgtgcctgtagtcccaggtactcgggaggctaaggtgggaagattgcttaagccgaggagattcaggctgcagtgagccaagattgtgccactgcatttcatcctgagcaacagaacaagaccctgtctttaaaaaaggaaagaaagaaggaaggaaagaaggaaggaaggaaggagagagagggagagagagaggaaggaaggaaggaaggagggagggagggagggatggagggagggagggagagagagagaaggaaggaaggaaaggaaggaaggaagacagagagaagctgggtgtggtggctcatgcctgtaatcccagcactttgggaggctgaggcgggtggatcacctgaggtcgggagttcgagaccagcctgaccaacatggagaaaccccgtctctactaaaaattcaaaattagctgggcatggtggcacagacctgtaatcccagctactagagaggctgaggcaggagaattgcttgaacctgggaggcggaggttgtggtgagctgagatcacaccattgcactccatcctgggcaacaagagcaaaactccatctcaaaaaaaaaaaaagaaagagaaaatgaagaaagagagaaatagtctaggacaagtcagaaagtccaagcaggacatagatggtttgtgtaagttgtgataagatttgtaaaggggaggccgggcgcggtggctcaggcctgtaatcccagcactttgggaggccgaggcgggcggatcacgaggtcaggagatggagaccatcccggctaaaacggtgaaaccctgtctctactaaaaatacaaaaaattagccgggcgtagtggcgggcgcctgtagtcccagctacttgggaggctgaggcaggagaatggcgtgaacccgggaggcggagcttgcagtgagccgagatcccgccactgcactccagcctgggcgacagagcgagactccgtctcaaaaaaaaaaaaaaaaaaaaaaagatttgtaaaggggaatttacaaaaacaggaattttgtttgtgattaagttagctgcgattaaaaggagattatttctcctttctaaggaatggtcccctatgttaaaagaaggtctgcttaaggtattgatttgctcttaatgaaattataagaaattttgcttttcaattttttgtttgttagttttgagatggagtctcgctctgtcgcccagactggagtgcggtggcgtgatctcagctcaccgcaagctccacctcccagggtcactccagcctgggcaacagagcgagactctgtctaaaaaaaaaaaaaaaaagggatgaatgagtgcctgtccacctccatttcatctggcctagcatatttaactgtctacacgtcttttgattctaagtctcttggccacagcggtcccacttagggacataatatagccagggcaggtagcacaccaccctggcatcgatatggggcacaataaaagcttggccatgatactgcctctggcataccatgaccagaaaaaaaaaaaaaaaaaaaaaaaaaaacacatgcacctgaaaatctagttgaggccatgacaggaagtgggtagggggagggagagtcagccaggcctcactatatttcctcgccttggaattccacacatattttccctgatggtaccaccaattataattcttcttgtcccccttggagggccttagtccctctacaaacaacagtgtctttctcaattcccataactgctccccataatactggtatcacattaaattactactttccccccatcccattcatgcttaaaccaaagcaccccttgaataacacaggtacttaacctttttttttttttttgagacacagtcttgctctgtctcccaggctggagtacagtggcgtgatcctcagcctcccaagtagctgggattacaggcatgtgccaccacacctggctaattttgtatttttagtagagacagggttttgccatgttggccaggctggtctcaaaactcctgacctccagtgatccgcctgccttggcctcccaaagtgctgggattacaggcgtgagccactgcgcccagcggtacttaaccttaacagctcccatcccattccagtctgtgacccacagtggatatctgtggctatatggatgcccactaaatcaatcagcctataaacaactcattcctcatttgagaccacgggtaccaatgtgttgataacatttggctcaaaggtcaacatatagtaagacaggtgaagccggccgggcgcggtggctcacgcctgtaatcccagcactttgagaggcctaggcgggcggatcacgaggtcaggagatcaagaccatcctggctaacatggtgaaaccctgtctctactaaaaatacaaaaatagagtcgggcgtggtggcaggcgcctgtagtcccagctactcgggaggttgagacaggagaatggcgtgaacccaggaggcggagcttgcagtgagccgagatcgtgccactgcactccagcctgggcgacacagcaagactctgtctcaaaacaaaaacaaaaacaaaaacaaaacaaaacaaaaaaaagacaggcgaagccttctaatatacaattatacaacatcacttgcccaagcactaagtgagcaattggccttctgttgtctggggtcagggctgctgtgggcttgttggccccatggggaggatttgcctaacatgaggcaactcttcaaaactttacttttcactctacataccttcttataaaatgggagatactttagataaattgagactctctcgattctatagcagatatagttatggataatagattggcattagactatttgttggctgaacaatgacaggtatatgctgtgattaataaaacctgctgtacctatgtaaacaactcaggtcaagtagaggaagataccgacaaaatatatgaacaaggctgggcacagtggctcacgtccagtgcttttggaggccaaggagggtgaatcacttgaggtcaggagttggagaccagcctggccaacatggtgaaaccccatctctaggaaaaatacaaaaattagccaggcatggaggcacatgtctgtaatcccagctactccggaggctgagggaggagaattgtgtgaacctgggaggcagaggctgcagtaggccaagattatgccactgcattccagcctgggagacagagtgggaccctgtctccaaaaaaaaaaagaaaaagaaaaaaaaaaaagggccaggcatgttggctcacgcctgtaatcccagcactttgggaggctgaggcgggtggatcacaaggtcaagagatcgaaatcatcctggccaacatggtgaaaccctgcctctactaaaaatacaaaaattagctgggtgtggtggtgcacacctgtagtctcagctactcaggaggctgaggcaggagaatcgcttgaagccaggaggtagaggttgcagtgagccaagattgcgccattgtactccagcctggcaacagagcaagactgcgtctcaaaaaaaaaaaaaaaaaaaaaaaaaaaaaagaacaagccaagtggctacatggtgttcacaaccccaatacccagactactatgcggaattccataaggggtttctaccggcagtgacttggtttttacctaggacctttaatagctctcttgttactattgatctttgtttggcctttacttatttaacctcttagtaaagttcgtgtcttctagattataacaattccatgtggaaatgatgcttgcactaggtttctgacccatcctgtcttctagcctggaaaataaagatctcctgcctttggggtccttagatcaggcaaccagagattttcactcctccaacaccaggcagagcctatgcccataagatcagcaggaagcagttgtagagggtggacctctgcccttctaccactttttaagattaaggaggagtctgacgcctgtcatcccagcactttgggaggccgaagcaggcggatcacctgaggtcaggagttggagagtagcctggccaacatggtgaagccccgtctctactcaaagtacaaaaaattatccatgcagtagtggcgtgcgcctttaatcccagctactcaggaggctgaggcagaggttgcagtgagccaacatggtgccactgcactccagcctgggtgagagagcaagactctgtccaaaaaaaaaaaaaaaaggtctggtgcgatggctcacgcctgtaatcccagcactttgggaggccgagacgggtggatcacgaggtcaggagatacagaccatcctggctaacacggtaaaaccccatctctactaaaaatacaaaaaaaattagccaggcatggtggtgggcgcctgtagtcccagctacttgggaggctgaggcaggacaaaggcatgaacctgggaggcggagcttgcagtgagctgagatcacgccactgcactccagcctgggcgacagagcgagactcgggctcaaaacaaaacaaaacaaaacaaagattgaagaggactctacagtctctccgggaaggaataaggttagagatcagcaggacttgttttctgagcaccagtcacaagaccttgctgaacaaaacatgatctgatcaaaagaggatgcaggaaagacattggccaaaactagctaaaaccaacacggtgaccaaagcaacctctagatgccctcattgttcattgtgcactaattataatgccttcgcatgctgaaagacactcccgccagcaccgtgacagtttacaaatactgtggccactcccagaagctaccttatacagtttaaaaagggtagaggcccagtgtggtgtttcacgcctgtaatcccagcactttgggaggcgggtggatcacgaggtcaggagatcgagaccatcctggctaacgtggtgaaaccccgtctctacgaaaaatacaaaaattagccgggcgtggtggcaggcacctgtagtcccagttacttaggaggctgaggcaggagaatcgcttgaacccgggaggcggaggtttccgtgagccgagatggcgccactgcactccagcctgggagacagagcaagactctgtctcaaattaaaaaaaaaaaaaaaaaagccaggctggctcacgcctgtaatcccagcactttgggaggccgaggtgggacagatcacctgaggtcaccctgaccaacatggtgaaactccgtctctactaaaatacaaaattagccaggcttggtggctcatcgcctgtgatcccagctactcgggaggctgaggcaggagaatcacttgaacccgggaggcggaggtttccatgagccaagatcatgccactgtactccagcctgggcaacaagagcgaaactccatctcaaaagaaagaaagaaagaatgaatgaatgaataaataaataaaataaaaattaaaaaaaggtagaaacccttgcttccagaaactccccactccttttgcagaaaactcgtgaatagcctgtcctttatttagcatataatgaaggaatagacataaatatagctggccagcaatccacgagggctgccgctactgctctacggagcagccattttcctgcactgttgctctaataaacttgtgtttgctttgctctgtcttgtttgctcacccttgaattcttttctctgcaaagccaagagctctcccagtctgagccccaatcatcaaagatgattttgagggcttcagtatttaaaggggaaaagcaggctggaggggaaggagggaggggatggtcacattattaaatccgtatgttggaagagaaaaggagcagggaggggaatagtgacatattcatctagtgcttctacatcggcattttacacaagataaggtgaatgcagagtgtagatatttaaccttttatccgtggctctctgcttaggaacaaaaggagaagcagcttcttgcctgactcagctttcagcttaatttttttcttttggcagagtgaattgggattccaagattttatttgcctttcccatcatgcgattggataccacaaagcagtgaagaacagtgagtgcccatgtacttgacaatgaaggggaatcttccagacatacatgaagcgaaggaaggcaggcaaaagagtgtgcttgtgtgatactgcctatttggggctctagaagaggcaaaactaatctatgggagtttgaggataatgttcaggataatggtttacttttggcaagtgttgtctgagaagaggcacttgggagccttctgggggctggaaatgttctgtatcttgagctaggtggtgggtacacaggcatatggcttgtcaaaaataattgagttagccgggcacagtagctcatgcctgtaatcctagcattttgggaggccaaggtgggtggatcacctgaggtcaggagtttaagaccagcctggccaacatggtgaaacccctgtctctactaaaaaaaatacataagattagctgagcatggtggtgggcacccgtaatcccagctactcgggagtctgaggcaggagaatcgcttgaacacgggaggcagagtttgcagagagccaagatcacgcaactgcactctagcctggaggacagagcaagattccatcttaaaaaaaaaaaaaaagaaggccaggagtggtggctcacacctgtaatcccagcactttgggaggccaaggtaggtggatcaccagaggttgggagttagagaccagcctgaccaacatggagaaaccctgtctctactaaaaatacaaaattagccgggcatggtggcacatgcctgtaatcccagctactcgggaggctgaggtaggagaatcgcttgaacccgggaggcagagtttgcggtgagccaagatcgcgcaattgcactccagcctgggtgacgagcgaaactccatctcaaaagaaaaaaaaaaagaaataaagacataaaagatacttggggctgggcacggtggctcatggctttaattccagcactttgggaagctgaggtggctagatcacttgaggtcaggagttcaagaccagcctggccagcatggtgaaaccctactaaaagtataaaaattagccaggaatgatggcaggcgctaatcccagctactcaggaggctgaggcaggagaatcgcttgaacctgggaagtgaaggttgcagtgaactatgattgcgccactgcactccagcctaagcgacaagagcgaaactctgtctcaaaaaaaaaaaaaaaaaaagttgagtcatgttgtgaatgtatttaacaccactgagccgtacacttaaaaatggtgaagatgttagattttatgttatatctattttaccaccatacaaaaaaattgagttataccttaaggtttgtggactttattacatgtcagttgcacttcaactgaaacatttagcacgatcgttgcccctggctcctgagtaatttttttcatttttcagacatgaggtctcgctctgtcgcccaggctggagtgcagtggcacaatcatagctcactgcagcctcgaactcctgggctcaagtgatattcccacatcagcctcccaagtagctgggatgtcaggcataataagctactgcgcccgtccccccaagtcattgcaaatgttctttgaaaataccaccttcaggccaggcgcagttgctcacgcctttaatcccagcactttgggaggccaaggcaggcagataacttgaggtcaggagttcaagaccagcctggccaacacggtgaaatcctgtctctactaaaaatacaaaaatgggctgggcatggtggtgcatgcctgtagtcccagctattcaggaggctgaagcaggagaattgcttgaacccgggaggtggaggttgcagtgagccgagattgcacccgcagcctggatgacaaagcaagactccatctgaaaaaaaaaaaaaaaaaagaaaataccaccttcagtggccacatattttcccatccacggatgtgtcctggtaccttcattcactctcaaatctttccccagaattgtgagaaccacagccccatgtcacagccccaaggttgcagacaaggtcccgacccacgttaagacgcaaaataatttattggaaggtttttcttagacccctgggaaggctaggaaacctggcttggaaagaaggaggagctcaaggaggcaggaagctgccccacagcctgggttaccccaggaataggctggtctaggggccgctgtaaccactgctgacactgtggatgtcaccatcagggacagtgccactctgggacgctgcagccatagccactgggaagaggtcccagtgggcccggattctttgtggaggaatctataggcctgagctctagaggctgggaaatggaggggcaagtctctggtccccatgctcaacaagaccccctcagtggggaattcctcattgcagaaggggcaccagatgcagggcagctaaacaagcagccagggattcctaccccgagaaatgtcctctaagacaataacagccagtatttgttgagctctcactgggtgccaggcccctgtgccaaacttcctacatggattatcacaaagaatactcacattagccctgtggggtgggggttattattatcttgattttgcagacaaggaggcaggcacagagcaatttggcaacctgcccaggaccacacgcatgaggagcaggaggcggcattgcattgggggcacctgtgtgccaggtcagtgcagggcactttgcagtcctcttagggctgagggccttggacactcagcaccattttccctgctctgtggctgcagggggctgcaggggctggaagcctgacagccacgtttccttgaagcccctgcagcagggttctgggttacagcctgtcagtcacgggcatttgcctgacacctggaaggctgtggggaggtgcagtggcaggcaggggtgggctttgccagatgtgacactttgccagtgacttctgggggtctcctggggctgaccagcccccctccgagtggtgcatgctcctgcaattcctccagtcctagtttcttttctttctttttcttaagacagggtctctttctgtcacccaggctggagtgcagtggtgcaatcatggctcattgcagccttgacctcccaggctcaagcagtcctcctgccccagcctcttgagtagctgggaccacaggcgtgcaccaccatgccaggctacaaatcctaacttctggaccaggtgtggctgcccctcagctctttggaaggttttgcaagcctcaaattccccgtgttcagtcctttcctgcttgaaatgccattttcccaactgaaccttgatgaggcagaggtgttaaggcaaagcagctgggcctataggcctgagctctagaggctggggaatggaggaacaaggctctggtccccgcgctcaacaagaccccctcaatggggaattccacattgcagaagggacaccaggtgtggggcagctcaacaagcagccagggcctcctaccccaagaaatgtccttctaggataatagccagcatttgccaagcactcaccggtgccaagcccctgtgccaagcactcaccgggtgccaggccccaggaggctgaggcaggactggctttagaacaggaaagctgggggtgcgagcccggctctgccagttctgtgggtttgtggttttttggtcgcttcatgtgcctgagtctcattttcctgtttcctcatttggaacaggcagtggtggcgtctctcatggggacgtggagataaaccagggcgacatcggggacacacaagcccagtgcctgcggcgatggccgatgaggcgctctttccatttcctggtagcagatgaggaaagtgaggctcaaagaggtgatgtcatttgccccaaatcacacagttgggaggtggtggggtgcgaattcaaacccaggagtgtgaagcttccagctcgtctgtttctccctggctgtgggtcagtgccctgtgggaggccaggatgccggtcagggactggcatggcagggtgaggggagcagggtgggccagcctgcctcccctccctctcctggggctgctgccctgtggagtaggggactgccatggccctcacctgtccaccttgtctccttgcctgggccttgtcagccctgtgcactccacagggcagggacagggcctgctgttgacagaagttcagaacaaggcagtgcttggccctgggtcctgcgcagatcagtgctggggctggcctggggcccgagctcaagcctccgaatccccttgcccaggctggactcttgctgcaccggggcaggttggcagaggcctggaggttttctctgggctgcaggttgaggcacctgggcttgcagacgcacgtctggcggtccagcttcctccctggcagcctctctcctgcgacagcaatatggtggtctgcagcttcaggccagctccattgctgcccatgaggctaccccagtggagagaggtcaccttgcctcagggtcccagctgaagtccccaggctgcatctcattggccaggcttggtgatatgttcatccctgaccagtcgcagtgcccggggggtgcgccctctcataggccagccatggagtaggctggggtcagaaaaggcctctcctccctgagccacatgaactgagaatggggaggtgacctttccaaagagggggtaatggactctaggagtcagaagtagtgaatgacccggacggggaaacgcaggccccactgtcgccagccctgctgatggtggccatcctttcttcctcaccttggcagcaggagctggatggagtctggggaggtggcaggtacaggctggagctcagagtgtgagagacagttgaggatggaatgttctcttggagaagcgagaataatgtctcctccccttctccaaacagcaagtgcccggcccagcctctgtctcaggaaactctctaacagccaagatcagggccttatggagagctgacccaaggccaggcactatgttggacacatctgatgagtcacttcacttcagccttgccaaagcttcatgagcacccatttcacagatgaagaaacggaggctcagaaagacaaacgtttcagccaataagtggctgaatctatgctcaaacctaggtctgtgtgatcccagaccctgaattctacaagtccaccaaaaactcctctttatcttcttttattttttatgtatttatttatttttagacagagtctcactctgtcgctcaggctggagtgcagtggcgcgatctcggctcctctccgccccatgggttcaagtgattctcttgcctcagcctccctagtagctgggactaaagacgcacgccaccacaccccgctaatttttgtatttttagtagagacggggtttcaccatgttggccaggaggtctcactctcctgacctcgtgatccacccacctcggcctctcaaagtgttgggaatacaggcgtgagccaccgcaccagcctatcttcttttaaaaacatcatcagtccaccctgggtaatatggcaaaatcccatctctacagaaaatacaaaaattacccaggcatggtggcacatgcctgtggtcccagcttcttgggaagctgaggtgggacgatcacctgagccctggaggttgaggctccaatgagccatggtcatgccactgcaccccagcctaggcaacagaatgagaccctgactcacgatacataaataactaaaaatagccaggcgggctgggcgcggtggctcatgcctgtaatcccagcactctgggaggccgaggcaggcagatcacgaggtcaggagatcgagaccaccctggctaacacggtgaaaccccgtctctactaaaaatacaaaaaaattagccaggcgtggtgacgggcgcctgtagtcccagccatttgggaggctgaggcaggagaatggcgtgaacccgggaggcagagcttgcagtgagccaagattgtaccactgcactccagcctgggcgacagagaaagactccgtctcaaaaaaaaaaaaaataaaataaaataaaataaaataaaaacacataaaacatcatcagtgtcttgttaaagtagtgctgttctagttgtaaacgagttagtgtgaggttgtgggccatgtctgaggcctcagctctcagcccaggaaataaggctgttgtgagtgagtaaggtgggggtgaaggatgtgggaggggggctctacttccaaagttgctgaggcagtgttgaaggccgcaggacacttcctcaccactgtggcccaactcttctttctccctcaaaacccagctcgaaggacacttcctcccagaagtcttctctgctgtgcctataaccctcccctgaccccaggaagacacacacacacacacacacacacacacaacttctctgtgtactccatcccctacgttgtactcatcaaagccccaaccatagtgtgtgtgtgtggtgtgtatggtgtgtatggtgtgtatggtgtgtgtgtgtgtgtgtgtgtgtgtgtgtgtgtctgtctgtctgtctcctcggtcagactgggacaacctgagggcaaggagagggaattccctgatgcccaaggtgtgccccgtgtagatcatggtacagagtggaggctcagcaaacagagcataaatgaatgagtgagtgaatgaatgcatggaatcttggggtgagtttccctgaagacagccccagggtgctgtggctgtaggagctggaccgtctagtgccttggtctgggggtggctgaagctggaggagggaaagaggccagtcctttgcagcttctggaggccagagtccaaggtcagcttctctcaacaggacccctctgaacccggctgacaccacggcctttggaagccatgtggtcagtaacacgctgtcacccttactgcagtctgttcacctgacctaatgactgggaacctcaggtctgtgactcaatgcccagaatgctgtctggtatgggggtatgggtcacacctggctcatctccaggacagccctgttctgcgtgtctgccagccaaggggtcacgtgctaacctggctgccccactgggggtgggaggggcagcttcaggatggggccgcatcaggccccatctccctaccaggcccgtcagtgggcaccctgagcctctctctctcattccttcttttgagcctgcagcactactccccgaccaaagcacactttcccttctcgtctggaggagagatggggcctcgtgccagctctgcccctgcctgacacacacgcttggcccgtcactgagcctcagtttccctctctgtatttcttggctgtgcaaaggcagtcgggggaggctggccctttaagctggatgaggctggtattttgtgtttttttttgagacgaagtctcactctgtcacccaggctggagtgcaatggcgcgatcttggctcactgcaacctccgcctcctgggttcaagtgattctcctgcctcagcctcccaagtagctgggattacaggtgcccaccaccacactcagcaaattttttgtatttttagtagagacggggttttgccatgttgggcaggctggtcttgaactcctgacctcaggtgatccgcccgccttgggaggctgggtttttgagctttgtgctgttggggcccagccctcagggccgcgtgggaacccccggggcggggtgttctataccaggaagtaggcagagggccagcccgaggacagttcgtttcttgccagtcccctgacctctcttggcacacagcctgtggcagcagcaggttgaagccagacgctgctcagacctcacaccacgtcgtttgcccaacccagagaaagctctgtccccggcttctggctccttctctgccaggactcactgggtgtgatgagttggtcttggggcactgtctgggcacagcctgtttgcccaacatggcctcctgggctccatgcttccgcaggtgggaggggtctggactggcccaggggctctgacagcggctggcaacctgaggttttgacttcagggtgacctgaatcctgccgcattatggaggctggagtctctgggggctgctttcccagagaagaagctccttccccatcagcctgacattggctccaaggactccatgtggctggagggctcagggctaaggggagggaagccccgggatggcagtgaggggtgagggaagatttgggaggtgacatctacaaagagacctgagcgggtggggcaaagagggggtcccaggcagagggagaagcaagtgcaaagaccttcataacccaggggagcgctgagaccaccgaccagcagcacccccacttcttcaagccaccactcctcagggcctcccaggggtccccagcctggagcaccccatgtggtagagctggtaggctgggggacactggggactgctgtcccacttggagcctcgggctactccgcccaggagcagcgatgtggaaccttgttggattttcatgttcccaaacatccaggagacacacagttgtgagtttccagccaggcgatctctaaggccagagcagcccttgtgggtgtcagtgaggaagggcagaaagactctggcctcaagctcagctccctgctgcagggagttgaacgcccctttggtgagtggctctagctaaacaaacacgtgttatcatctgtcaatagcggccacctccttgctggctgggctgctgctggctcaaagcccagagcagcccttccggggcactgcctgccacagccaacagtcagggaagggcagctactgccctgggttcaagcccgggctacccctgctcctgctcactgtgtgtccccaagcaagtcactgtccctgcctctctgtacagtgggaggcctggatctctctgctctgggaagacacccagccctggaatggttgggccacacttggggctgggggccaggaggaagttggagggctgggctggggctggggctgattagttgaagccagtagaaaagtacaggctttgctattagattccaggaaataacaaaagctgctaacagttaccgaatgcttaccacgcacccgacgtggtgctcacgcatcttttgctgttttatttcatccttagtgagttgggtactattatcatctccattttacagagcagaaactaaggctcagataggagacgctgcaaaatcaggaggtggtgaagacagaatgtgcccctagggtgctgatcagggccctcacctagaggcagatgcccccatctcctaaggtcaatggtcctcagctatcatcccttttttttgttttttgaggtggagtctcgctttgtcgcccaggctggagtacacgatctgggctcactgtaagctccgcctgccgggttcacaccattctcttgcctcagcctcctgaggagctgggactacaggcggccgccaccacgcctggcaaattttttgtatttttagtagagacagggtttcaccatgttagccaggatggtctcgatctcctacccgcctcagcctcccaaagtgctgggattataggcatgagccaccacgtccggccagctatcatccccttttaaactttctggactggccacgctgaacttctcaccctcctttccataagacaccctgtccttccatgtctccaggactttgcaggtgtccaccgcctctgccctttgggcttatgaactcctattcatctctcaggacccttcttaattttacctcctccatgaagcctgctttgcttggttccccagcagaaacagggggcactctccttggtcctcctgccacgcttcttccacacatgcatcctggcaattaccacattttactgatgttcgtgtgtgtttccctggagggaaaggagtgggtttcaatcacccccatatcccctgtgccttttgagtgaccagccgttattcggcactcaaatagggaaggctgtcaggggagcagctgactgcagagagactgccttggaaggaggagaggcccgggggtggagcggaggtttcgggtaaacagaggcggcctgactgacagaggggcatcagccaggggaaaatagaaccgggatccaggatcgtctgagtacgcagctgagctggagaaggttgtaatgaaggcagtttgagcaggtgtcagctgaggagggcagaggttaggggcagagcagggcgcatgaggtgtctggggtgcacccacagactgttgaggcaggacacgggtaccaactgacttgggtgccagacccatgtgaagggcacgatgggcactctcctgctgaatcctcaacaaacccagagcgctttcactccctctgctttacaagttacaaatctgaggtttgggaacaagtgaggcagggcaggtgccccccaaccttgccccaggccaagtgggtgcctgagtcaactctggtccacttggatgacagtcatgtgccaccacacctagctcagcctccccagcttgccgcttaccgcagaagaaaaacatggtttgactagcaagaggaggaaattagagttttgtgtatagaagagtcactctgggccgggcgcagtggctcacacctgtaatcccagcactttgagaggccaaggtgggtggatcacttgaggtcaggagtttgagaccagcctggccaacacggtgaaaccctttctctactaaaagcataaaaattagccgggtgtagtggcaggcgcctgtaattccagctactcgggaggttgaggcatgagaatcgcttgaacccaggaggtggaggttgcaatgagccaagatcgtgccactgcactccagcctgggcgacagagtgagactctgtctcaaaaaaaaaaaaaaaaaaaaaaaggaaaaagaagagtcactctggagaacagctaagtccaagactcctggcctgtagcttccagtcacgttctatcagtgctcaacttgccatccccactgaggctggtgtgatgaaatcaaaattacctgaccccggcctgctgctcagggagtaaccacactcatgaagagtggcaaaagtgtaacgtgctttgcagacgtgcttatgagatgtaaattgcctttcggtaaatagaaccctgcttcccattcatgtaattatagcttccagcctctgccccatgagagaaaacacttgtcctgaggggaatcacagtaataatttagagaataacacaagaaaccttctcctcatcaaatgcagttattcctttgccccggatgacatttctgtcaagtcgctattaaaatcaccaagtccaggctgggcatgctggctcacacctgtaatcccagaagtttgagaggccgaggtgggtggatcacttgaggtcacgagttcaagaccagcctagggaacatggtgagaccccggcccccacccccatctctactaaaaatacagaaaattagctgggtgtggtggtctgtgcctgtggtcccagctacttgggagactgaggtgggaggatcgcctgaacccaggaggtcgaggctgcagtgagccaagatttcaccactgcactccaatcttgggcaacaaagcaagaccttgtctcaaaaaaaaaaaaaaaagaaagaaagacaggaaaaacaaaacaaaacgaaaaaaacactaatcgtcaagtccagcagcctgcctggctggaggaaacctcggacttcctttgctgtctctaggcatgctccgctcccctccagtttgactcaccctttcagataacaagaggcctgcccccatggagtgcctgagggccagcaaacacctgtggcttcctaggagcccgtgctttgggcagtggcacctctcccacttttcaagctccctaagcatatttgacagtgggcgtggatcaccccacttatctggggcataatctttagacagacttctcctggccccacataactgcatggaaagtgggtagaaagcaatgattcctatttttcgcccatagggattcttttttttttttttttttttttgagacagagtctcgctctgtcaccaggctggagtgcagtggcgtgatctcggctcactggaacctccgcctcccaagttcaagcgattctcctgcctcagcctcccaagtagctgggactgcaggcgtgtgccaccacacctggctaattttttgtatttttagtagagacagggtttcaccgtgttagccagtttggtctcgatctcctgacctcatgatctgcctgcctcggcctcccaaagtgctgggattacaggcgtgagccaccgtgcccggccttttttttcttttaaagagatggatcggtcttgctatgttgcccaggctggactcctgggctcaagtgatcctccagcctcagcctcccaagtagacccacaggaatgccgaggagacagagactttcagaatcaccctggcaaaggtggggctgcgcagctggggctgggggtctctggaacactggcagctctgtggtccttacctgtgctctctagatatttgagatgagcctgggcaatatagggagaagcccgtttctacaaaaagtaaaaaaattagtggggcatggtggtgcgcacctgttgttccagctactcagcaggaggctgaggcaggaggattgctcaggtctgggaggtcaaggctacagtgaggcatggtcacaccaccgtactccagcccgggtgacagagtgaaaccctgtctcaaaaaaacaaaacaaaaacaaaaaacaagctggtgccttggagcctggggttaatgtctgcctctgtcacttgccaccagctgcacaatctcaggcaggccgatttccttgtttattaaggccccagagcaccaccaccctgagtggggtattccccgttcgtttccccacaggcccagtttctgtatggctccctgtatggagtgtggtagccccccaaggcatgttgctttgttccctgagccccagaagcctgcactcactggaagtccactggaggcccaccatgaaggttgtctgccatcctcttgggtgacccatgccatgatttctcacaactgtgaccactccactaccagggtcccgactaggaccttgttctcacaggaaagtgtggcccctccagagctctgagcgcctgttctccgcctgccctccacacttgcttactgctccaatgcttggcagtcctctgcccacagggagcctccaggattcaaacacctccaccttcacctgtctagtgacccactcagctcacagacttgccttttcttccctaacctgcaggtatgcacggcttctcatgcaaccccttctcctgccaacctgaaccctagggcccccagccctgctgtcttctgtggtctccacctgggtaaaggcccacgtgtgcctgagaggctcacacctgtgcagggaagtgctggccaccagcctgggctcaggacactgacctggtaccttgaaagtgatgagtagatatttctttaatgaatgataactaggtttctacagtcagcatgctttcccattctcaatttcaaacctccttcttactcctcaaacctcctggccctcctgtcttcactctcatctgcctcctacttaccagacaagagaaaacctcactctggactggctccctcaccacatcccaaatcctcttttcctcctggaaggaagacggatctactctctgaagacccccctgaggccctactccaagtaactccttcactttctttctcagaacacacttactatgcaagctccccgcctccaagattcaacttgggtctcctattaatgaaatgaacctcctcccttcccagtggtcatcctctctcgttcctccttcacaaactttgcctccaccctctcaacccatccggctcttccttgaagcactgacctaagctcagctctccgaagtcgaggaccaacagcgggggagcagcctttcctgccgcccccaggcctcagtgagggtgggtgcaggggctgccctcagccagctccctaggctagctcactgctgtggtctgagcatggccccaggttcatgctggaaactcagcccccagtgcaacagtgtgttgagaagtggggtctaagaggcaattcggtcatgaaggccctgcctcatgaatgaatggattaatgccattatcgtgggagtgggctcccaatagaagtcaagccccttcccctctctgcagcacgggacgatgcagcagaaaggtcttcctcgccagaatcggcccctccatcttgaacttcccagcctccagaaccatgaaccaaacaaacgtctattggttctaaattgcccagtctgtgatattgtgatagcagtacaaagagaccaagacacccactctcatggctttgattttaccccacattgaagattcaaatcttgttccctgctccaaaccccaagaacgtactaggtgctcaaacaacacggaagtgcaccttcactcctgccacactgggccccagctgctcagggcctcacactggttccagcggtctggtgtgcctgagcaggcccagcagcgctctgcctcccttcagccagagtagactcaacaaggtgggctgccccaaaaagacctaagtcactgtttactgcaagtcagctgaaaaccccacaaacctggcaaggaggacgcgggatctggcaacagatctggctttttcagaacattaccaaagcaatctctacgggcctgcgtctgtcttctgtcctccagattagcagctttacaacagtttccatgaatatgtgttaagcttaacggcctgggagaaaataagtggcagatggtggaggcagtgttagtgagcgaccccctttcccagtcttggccattcacacacactgcccctagcaatccctggtacccttttggaagaatccaaatttacttttcagccgggcatggtggctcatgcctgtaatcccagcactttgggaggctgagatgggcagatcacttgaggtcaggagttcaagaccagcctggccaacatggttaaactccatctctaccaaaaatacaaaaattaacccagcatggtggcgggcgcctgtagtcccagctacttgggaggctgatgcaggagaaccgcttgaacctgggaggtggaggttgcagtgagtcaagattgtgccactgcacttcagcctgggcaacagagtgagactccgtctctaaatcaataaatttccttttcccctgggctctatcattagcaaacacaagtaatgcccatgtgctctaggacatcagggagggagtaaacctcaccttcctttgcatgcgagggtcacacgtgccatagtcacagggagtgccctggagctggcaacttgcttgtactctgctctgggtgcgactgggttctgcagcagagtacgcaacggtgcagcaggtcagtgacagaaagttgacatttgagaaacgagtcacacaagggctcccggcaagttagctaccattggctattggaagagtagagagaaaacctgagatgctgaacaagactcctaagtacttaacagacatgccacgcttagcctttttctatactgggaacccaagtttgggtggatacttcaatcaattaggaaaaatcaataatcaatacttgactagtcccgtgtgtgcagcactcacccagattatcctcatgagtgaatgcagctcaaccagaaacttaactgatgacgggaccaggcgtccacactgatctccggcacagaatgatgctgggtgccaggaaagagatgtggagattaagcagcttgctcagggatactcagatgttgcaggtttcctctctcctgtacagtcatatttcaacagtaaatgggtgaaaaaaggacccaggccagtcatgagtatgctaactttgaccaatacggagaggggggaaaaaaacaactccaagtaatcaggaactattaatgcatttgggttgcaaaagccttcgatgttattgtgctccatgttgagggcaaacatttcttgggttcaaggactaggaaggtatgtagtttagtctccctactaaaagaagaatgtatgtttaccctctcttctcttaaaaatgagtggcaccagacacaagagaccagggcccagagaactcaacactcacaggtattgaaaagctttagaaattgattttacaaattgttttacatgaaaattttgtggagaaagtcaccactttgatcttttttttttcttttcagatacagtgaacaccggccaaattgttttaatttccgaatttattaaaatgattaacctcaatactgcaagtgcatgtacaaaatatttgtaaaaaatgtttttaatgaaacgttaaagaacttacctcaaatgctgaaaaagtcctttttcattctttcagtacaaggaatacattgtatctcaaaagtattacaactcagcaaaaacaatttataacagtaatttgaaaatgattgaaaattgaatactttacatatatttctatgatcatctcctaattcttacaatgccaaaatcttaaccaatcattgcataagctcaagctaagagttttattgaatgcaacctcttctaaactggtcaacggtgtgtggctgtcaccattccacacggtgaagttctacagcagatccggaacagttccgaggcccctacctttaccaacggaaattaggtttccctagaaggcatcaacagtggctgctgagtgcttgtgcataccgactcctgagaggcagtgatttactaccaaatgtcactgctttgagacccatgggaaggttggcctccaaagaggaggccatgataaaattaaaacatcaaaaataagttactaaaattcagctgaaaaatgaaaatgggaaatgtgttttgtcactttttaagatcgaaattcccaaaatagctatcgttggtattcaaataaggtttaagatttagtctctgaacctcttcaaaacaccccaaactaaggtgggaatacaagaggtgacccgctgccctccagcacctccagacacagggtctaccttcatcttcctcagtggcaggggttcacatttctatgcagggaccccatgagggctggacgtgctctgcaaagtgctccgggtgcctcggacaggtgctcctgagaggctgtgtgggctgccctacttcactgttgaagacctccagacgcagtgaacgggggtatgggtgggtgtggaagaaggtctaccacatgctttccaaacgcctgaggagttcgactgcaccacaacaaacaaggatgagactatgtaagactgcagaagtagttccttagagaaccaggagaaaacaatctactttctaaaaatgttcatgagtcttaatttctatttggaacctatgggcaatcaacagtcttaaggagcgtcattgaaacaatatccccccaaacctggaaactagtaggaatcaattagtagtaacagtaagcattgagattttctccactggacttttcatgaccttcagattccttttcatatttcaagacatgggctactttcctatagacactatacaaatcccctgaattgatttttacttaggaacactgtatatcagaaagtacaggtacacatttcccagaaataaagagacctactggtgtcaaacacctgttacagatttatattcccaaattctctgtccaatgatttgcaaaataatccagagaaatgaaaagaacctggtattgaacataaagtagtaataaaaatttgctcattaagttaattaaaattaatttctcaaagtgcttcaaaaaacaaattaaatctgactcctttttgtttaactgataatatagtcaaaaaaatctttgatgttttcataataaactaacataaactaacataagccaagaactcccactgatgcagtgcttaaaactatatatttataatttcctattttattggcatgaatatttctaaacttaaaaaccttcctggtaagttcttttaatttcttatgacaaaaatttctcacaacacacaaatatttacaacatatacattgttttcagttctttacattgaatctcaaagacaaactttttttataggttaccacagaacaaaagctgtgactcatgtttttatttcataaactattataagttaaagtgaatagatttttttaatattccttgtagcattttacaagtgcaacagaaaacttgaagaaccaaattaagatagctgtagttcattagataaatgttgcttgttgtcatcacgttgttcacagcaaatttttgaaaaaataagcaccaatcattcttgcaaagaacaattttatctaaaaggattgaaaagagttaaatacaaggtttttaatttacatgacaagcaataaatacgctgtatcgaacctcatcccacacactgctaccctcgtacatataatgaactgaaaagtgagctgtcacgtatgtcattttttttttttttttaagaaaccaatctgactcccaaccaatggtttgcgatattaacaaaggccacaaacagtacacctgggccagcaaacagtgtgaaactgacaaaactccaagggggaaacatctagcaaataaatcaaaaagccaaagatcattgctggtgatattagcatactagaaacccttaatatgctgctactatgatttgttttaaattattgtttagtcatatattaaagagccagctgatgctcttacagttaaaaaaactgtgtagccacattactgttttcaacgtcctgtgtggaaagttgctatcactgtacaattttgcttgagcctttattttacaacagggctttacctctaactcagaattgcacgtaagaaggctatttaaaaagtacgataaaaatttgcacaaatcagacttaagaattgagtcagtatgctgtacactttctacaatagtatgctgataagtgaagggacaatagaagtgctgccactaaactttcagttgaggaataattgactggaattttttatttctttaaagtagttatcccaggtcaagttaagaccaagagcttaggcattaagccttaaagactgatcttctcttctccttgaagaaatgtcaatatctatagagtcttttccaactattaacctcaagcgcttagctggaggaagaggaataaaatcgtcttcaaagtcatcatcatagtcatcctcctcttcatcgccctcagaagaggaggaatcatctgtactttcttcctcatactgactatagtcatccacctccattcgagactccaagagagaaagaggatcactgcagcacaccccattttcatgaagcccctctgtataagaccccctattttcctcatctcgttttagctggatttttaattttgtagaactactgcctgatcctgagttaaatccattattaagctttgctacatagagattgttatcgttgtcatggtctttgcttaacttgatgcttattttggaagagttcattccatcattctcttggtcatttgttttgctgctgctatcatgacgcctacgaagagtcaatttgggaatcccagagttattttctaggattaactgtgcatcataccttgtgattcgcctcttctttttactttttgcagttctaaagctgtcttttgttttgaagctatctgatgtcacaactgaacaaccgacgggtgaaggagcacagtctgtgtagctcacaggcacgcccacagtgccactgtgctcaccctggtcagaatggggacccatcaaatctggtaccgcgtcgtcttttccaggagaatcgtgcactggagtagattcctctatttttgcaaactgtttcacaagttttccttgtcgtgacttctttttggacatgcctgtgtcactcttatgacactttgcctcccctttttgtgcagtctcatgagccagttcttcctcctgcagcacaggagctggctgcagctgttcaccactgtcggggcaaggttccgtcacactgcttttatagccattcaacgtatttggttcaagcttgatgtcagaggcctccttcagatttgttcttgtcctcactgaccgccgagttatgtaggtgcagggcgagctctccccctgcgaatgagcacctctcacaggattctgtctgtgttctctcgccgcgtgtctagtcaagcacccgctggcaactgcggcttgggctggtccctctggctccttatcttttttaatgggcaaatttttatacagaactactttaggctctttcagtactaagtttcccatttcgagttttcttgaagcattcttttgctccagccgcttgcaatgatttctcaattttatctttgaaagtaaaggctttgcaggcttcttcagtttctttggtaccctggaattatttatatgagttagcttagatgaggtagagttggaagaagctggaattcttgacatagattgcctcgttaacgttctgctcttgctattcttttttacgccaactgaagattttcggttagaagctgtaaggttaaagagaaaaaggtgaaaagccttggtaacagcagagttcaagaaaagaatgcccaaacccaggctattagctacagcacgtttagattacacaaacgccaacaccacggctcctgctgcagattctgccagcgcacctgcattccctacactgcttctctttgaagttcttttctaatttatggggcatctattcatttttgaggtaagtagttgcacggttaaggagcttttcacagcagggacctagattccactctaagcttcttaatctgtcgtgacactggcccaaacgaacgctttcttctcctgatttagtagtttcccacataaaagatttcaaagaaagttaacatggttttttcctttcacagattctccttagtcatttaaaatgtttctaaaatccattgctcattaacctaaaggaagtacagcacttggccattaacatagagtagaaatagaatactcatgggctctaaggaacaaattctatcgcaatggtttcaaacaagaaaaacagatgctaagaaccatatattatcactctgaaaagtacagtcactaccgaaaaagaaatgcactattctaagttgtccccttcaactccgtgaggaacagaagaggcaaccagtgggctgtcaacttagaagagctgcaaagcttactcagccccatcccttcagtgacggccagatgccaacaatcacagtgaaggaagatgcacgctgctagaattgtacactctcaggacaaagggagatccaacttctttcctccaaggccaggatagaaaagggttacaatgaccctaatggtaatgacaacctgagtagtgatgaatatgattccatttgagaatgagcgtattcttatccactggaattatacagaactactaggtagaaaatattttttaaaatataaggatatttagataattcttttgctacagaatttctttatgcttacgaggcttgcctacaaggtggatcgaatagacgtgctgtcaatataaagaataaagttgaatggcttctcaaaaggcttcatttgtgactcaagcttaagctgctcctgtagtgtctctgaccttgccactgactttctgctatgttaatttttcctctgtattgacattccagactattatttatagaagttgttacacaagtcagtttctcaattacttagttcttgcaggtccagttgaaaaacttcttcctaatcaaaacactccatttacagattcactagagaagccacgataacaaaacgaatcatcaccacctctcatcagaacagggaggataaaaacaataaaacatgggtaagctcagcacactgcccaaccaagtgaggaccaggatcctgcagagaaatctgtcgctttctacatgcctcaggttgccagggcaactgccattccttccgcccagctaagcaagtaagttaccataagttcagtttttattgagagaggagcaagaatgcatcacaacattccaaaaatatcaaaccaccaagaatagaaggctctgcacctgaggtcaggagttcgagaccaacctggccaatatggtgaaaccctgtctctactaaaaatacaaaaattagtcgggcacggtggtacgtgcctgtaatcccagctactggggaggctgaggcaggagaatcacttgaacctgggaggcagagtttgcagtgagccaaaatcgcacgattgtactccagcctgggtgacaagagtgaaacttcctctcagaaaaacaaaaacaaagaaggtcctgcacgcacagactggctcataaatggcttcagggtacataaaccagcagaattcacagcaaagggattcacagtttgaaacaagaacatacttacacatgtgggctgctaccaaggtggcgcctctttttagaatagtaggagtagtgaactttgaatgtgattcaatttgagaacgagtgatttattatccactggaactatacagaactatgtgatagcaaatttttttttaataagaaatttagaaaataagaaaaaatagggaactcttcggctaaagggtttctttatgcttgcctacaaggtggactgaatggacgtgctgccaatataaagacactagtgaagaaaggactgcactgcttggcttccctttgcttggctctctcagatgtggctacgatgatcctttgctcattctatgcctcctcaaggactaatttatgaccaaacttagtggtttccaacctttgatttctcctctttccattccactctcatgacgtacctgcaagcacccttacacaacactcacatctatgtcatattctcaacagcaatccccgccatctggatccagcctgctcctccaatgagacagcctttggtgatctgacaacttcttgtcgtcaaacccagcacacactcctcagcccttccctttcttcatttctctgaatgtgacactgataaccactttttcttgagaaaacctttcttctcttggctgtcaaagagagcgcactctcctggttcccttctccatccctggcaccctccttcatcggccccttagactgttcttcttcaggtctgtgtagtcctaggccccaggtgacaagcacccattctcgcacggctattaccacttacaggctgacagttcccgaactctggccagacccgctcctaacttacagaaccaggtcaccaaatactgactgtctctaagcccctaaatggaactcaccatcaagtctcctgacgacgtcccctttcgaggtctccatcttggtcaatatcaccaccacatgcccagctgccaaagcagaaagctggaggtcctccttgactcctgctctcctgaactgcctcaccaagccaatcaccatgtgccgtggagtccacccctgcaatgtcactgcaacctgtctactcttccctgtctcgaaagccacagcctcctgcatgaactatggcagttttgtttttcctattgttttcccaacaatccgtttaccaccacatagccaggatgactttcctagtgtatcatgcagcttctgggctttaaacctttcagcaacctaatgccctaagaatgaagtctagaattttaacctgtgctcacatctcttcttcttagcctgtactcgccatgaagaaaagctttgactcaaactcccctctgtctatagagctgtctgaaaggccctctgctttgaataggcttcacttggccaacttctcatccccctgtaagactcagcttaggcaacacctccctgagggagcctctcgggactttctctgcaatgcctttcctatgtcttctcacagcacccaagaagctccttccttggtacttcttattttcacccgttggatgactcccattttatggtgattctgaattcggctctccccatcccatccctccttccaaaacattcactgttgacaacagaaaaccaaagcacttttatgtgtttgtctctaaactaacataaacgctccatttttgagcacaaaatgggtatgtatttgatgctatgtattacatcaacacagagatttcacttacatgttaccaatgtattctaattttgtttgaaaagcattatctcatcaaaagccctgtcaaaaggtatgctcatcaaatcaaaggaaaaaaaagacaggcaaagaatttgagaaatgtgacaaagatgaggacccagtagagtgacaagagtccttcactgtccaaagaagctgcactgtcctggcaggggttgagaatttcagacagtgaaggctaaaggaggaagacagtggccacaatgacaaactaaaagtcaatgattttaaagtccatcaagaaaccaaggactatgacctaagtggggtcagatgcacctgtgtttgagcttgctgtggcacttatatgcctcgtatgactcttcccctaggggctgggacaaatctcaaatacatggacctggactgtaattttaggtgggggtacacattcttctcagcaattactacatgctaggtgctgtgcaaaatggccacattcatcctaatgaacgccgttggaagggaaagcgattaaagctatgtgaaaaccaagcttacacgaactagcatgcctaaggtcatccagctggtgaatggcagagatgggacttgttaggccttcctgagcattaaaatcacgcttatgctgcctataaggcatatacagaagaattatggtgttggcctcaacttacgggtaaaggccccactgcatggctattatggtcatttcagggtgtcctcaaaatcataaggcagggtggcacaagacttccagtcagacaaaagagctgtgaccgacaccaaagccttcctgagcactcaggccgcactggaaatgcacaatcagcgtgaactaagataatacaagggccacagctgagcatctccagagctggaggatccagaaggcctctgacaggactttaaagacctcggtctcaaggagtttacttggcacaagcagctttcatctgacatgactagcacagactgccaatggctacctggaacggggtgttagaatttggaagcagcccgaaggctcagcagaaaagtgttcagatcaactcttgacatgagtgacagggcaggagtgaggagcagcgccccagcctctgcatctaggacaggtgctccatagttaagatcaacttctccctctggccgattcttctggggcttgtcctgacttgtggcacctgcagagacccgtgtccgcatcttcacagaccgctcgcgagcctctctctggtctcaccttccctatcacagcactaacttcagagggggcagcccagtcagcgaggcataagaggcctgaaaaaccagaatcctccagtcctggcattctaattcagacctgtggactggatttgtgaaaacggattccttgttgtctctacttctggatgctaaagcaaagtcacaccatagctctcaaggtactttccgaaaaagcacctgtatggaaatttttcttccaactactcagaacatttttttatacatgtgttcaaagaaagcagttcctctgtcagctgctaaattctaaacgaaccacatgataaagatgagcagccacacagaaaaagcactccgcaaacacatacacagcacatgcacccaccaccctgggaggagggactggcagtgctggctttcctgcaggatgtggcttccagaacctttctttcagacaggtggaggggatggctgagacaaacaccaaaagaaatacagcctaagagaacgcatgtaagaactcaagaaatccttatgtgaacatgacttaacatacaatggtctcagagacaactaaagccttgagctccttcagagagagcactgagccatgcctatccactctgcccatgacctcagagttagtcatactgatccttggattgctccaatcatgctgcagaaagggaatttgaataagccaagcaccccaatatcagcagtccctgcaaaatgtacacctttcttctgtaatgctgagacttcagcttaaagcgattattcagtccctctgaacttgaaagcctgtgcctccagtttgttctgcttacttgtgcacctgtcttatcctggagctaagtaaggcataagctccctgaggaaagggcccaagtctcaaacatctttgtatgtcttcaagaactagcaggatttcagtaagtatttagtttgttaatatatattcccaaatatttggtttaataaatattaatagttaaatattagtacacccaacatcttccaaaaattatttgtattcttatcttttaaactaagtagtatattgagttcagtagctatacaccagtaataaagttactacttaagcataaaacacctacatcacatagccattcaacataggcaactctgtggctgtctccatatacagatggcagcacgaacctaagtgtttttgtttaaaaatcacaggtctctggccgggtgcagtggctcacacctataatcccagcactttgggaggccaaggcaaggcggatcacctgaggtcaggagattgagaccatcctggacaacatggtgaaaccccgtctctactaaaaatacaaaaattagctggatgcggtggcacgtgcctgtaatcccagctacttgggaggctgaggcaggagaatcgcttgaacttgggaggcagaggctgcagtgagctgagagtgtgccactgcactccagcctggggacagagcgagactccgtctcaaaagaaaaaaaaaaaaagacacaggtcttactatgttgcccaggcaggtctcaaaactcctaggctcaagtgaccctcccacctcagcctcccatgtagctggggctacaggtgtgccaccatgcctggcttttaagtgtttttatgtctgcatttataaaatgggcttcacaagtctccagtttcaccaaggaaccagactcagaaaacaaatggtcgttatgctgcatttattatgagaatcaacagtcaacagttaatgattgactaactcttgttgttcactctggacattaacgaaaaagactggaatagggctacagcgctgcttttatgctacacgggttatgcttggactctgactcccagcagcaggtagattcaggaattcatggcagtgacattcaccatcatgggaaacaccttcccttttcttcaggattctctgtagtggaagagagcacccagtgttgggctgaaaacatctgaaagtagggagaagaacctaaaataatcagtatctcagagggctctaaggtgccaagaagtctcactggacatttaagtgccaacaaaggcatactttcggaatcgccaagtcaaaactttctaacttctgtctctctcagagacaagtgagactcaagagtctactgctttagtggcaactacagaaaactggtgttacccagaaaaacaggagcaattagaaatggttccaatatttcaaagctccgcaaacaggatgtgctttcctttgcccatttagggtttcttctctttcctttctctttgtttagtcttcgttctctttttcagtttccatcagatcttgcccccacacaccactggaatctcagaggttgcttctttctcctttccatctttactcctactttctggagtagccaatacagcatgtcacaatacggcactgttcaaaatgctcctctatcacaattctgagtctggtactggtggtctgctgaactgagtcagttcgttttgaaaaaggtcagcaagcaatgaaaaggtggaagccttaaggccagaagctatgaattccccaagtccatcatcttttctaacaaactggctaggcactggaatgtatagagtctaatttaattctactcagtccttttgtcttcttgcaggacttagcgacatcatcacagtctctaacaccttgaaaatgtttaaaacatatgatgaccttggaacatatgatgaagaactcatatccagttaccaaggtattcaagaaaaatagtctagaggacggtactgaagttagagatgggatacagactgtgcctctactcaaatcacgtctagagccttgaagtgcagccaaagctcacaagtcccagtctctctgagtatttaaaagtttaaaactactgaagcacactttataaagcaaattgtgtgaaaatacttttaaaagatatgcttatcaaatctcccttacttacttgcattgtttttttcctgagtggtatctgcatcagtgttagagctgacagattgactgtctgaatttttgctgctgtcacctaactttttaagcctatttaaacgtttatctgtttctctgagtccatatttgctattgataacaggagcaggcgcaggcagtcccactctggatttaaaagcaccagtgccccgtctgaaagagaaaatagcacaggttaaacaaatagaacacactttcttataataagcttaactgctgagggtacttggctacaggttaacagatgtgatgagctgctgaggccttaatcaccactggaaaccgaagactagaactcacaaaggaaattaagtatctatattataaaattaactttaaatctatatttaaaataataaaacaacttgttatgactattatcaatcattaattgcctatgagaaactactggaccttgtaaaattttttccttttttttttttttttgagacagggtctcactctaccgcccaggctggaatgcagtggcacgatcatggctcactgcagcctcaacctcttaggctcaagaagtcgtcccacctcagcatcctgagtatctgggaccataagcgtgtagcaccaccaccagctaatttttaaatttttttttgtagagatggggtctcactatgttgcccaggctggtctccaactgctgggctcaagggatcttcccagctgggtctcccaaagtgctggatttacaggcgtgagccacaaagtccagccctttaataaacattgccagattactttgccaaagggatagagcaaatcatggtcccactagcatggtgtgagttcctgcttctccacatcctcatcaacggtacattgtactccttaaattttaccaaagtgggccaggcatggtggctcacacctgtaatcccagcacgttgggaggctgaggtgggcagatcacgaggtcaagagataaagagaccatcctggtgaacatggtgaaaccctgtctctactaaaaatacaaaaaaaaattagcccggcgtgatggcaggcgcctgtagtcccagctactcgggaggctgaggcagaagaattgcgtgaacctggaaggtgaaggttgcagtgagttgagatcgaaacttacacagagcaagactccgtctaaaaaaattttactttttgccaaagtgatgagtgaaaatgaatacctaatcttgttttaatctcatttatggccatttttttcctgtgaagcatctctgcatctctttttcctttaccttttttcctatttgactatgtcttttccctataagcttataggagctttttgttattagaattttttttttttttttgagacacagtcttgctgtgtcacccaagctggagtgcagtggtgcgatcttggctcactgcaacccctgcctcctgggtgcaagcgattctcctgcttcagcctcctgagtagctggaattataggcgcgcaccaccacatctggctaatttttgtatttttagtagagacggggttttgccatgttggccaggctggtctcgaactcctgacctcaggtgatccacctgcctcagcctcccaaagtgctgggattataggcgtgagtcacacgtgcgtggcctttgctttaaattttctagagtaaaatgtgcagtacttatgaacatattacaattactactgtcagtacagtgtagcagagaaacatgcttcaaatgtatcctggagtgtctagcgcgactcagtgtctctgcacacgtgattccgtccattctcacttcttcacggagcctcttccttttaccctctggctctcagcacagtgtgtgtgtccccttcactgaactgccctgacagctggcactgtgctggtcttgtttatcctgcatgcacttggcctaacattaagtaactgttcagttaatatgtaatgaataatggaatgagctcctagatgcatcttcccagctaatttctgtaaaggcagaaacaatttggtgtttatgagaacttcaagaatatatgcagccaatcttgaaatcaaactgctcaaacagtctgacaatagccatggccactattctccatcatgctgttccatttaaaaaggacttacacacgtttctatctacttctcacactaaccttgtggagtaggtgggattatcctcattttcaccagtgagaaaacagaggctcatgaaagagaactaatctgctcaaggaaaatgactatacctgcagttctaaaccagggaaagagctgtttcggtgttggtttggaatcctcagtatgtggttaggtgttttcaggaccgcctccaaaaacttcattatatatatttactctattcattcatttaccaaatatttatcaaggacttactatgcaccagggtactgttctgtattctggggatatagcggaaaatgaaacagatacaagcccctgccttcatggagctcatattctaatgggaaaataaccagaaaccaattattgtagttaacatttgtgtattaactgtgtgctattctacatgctttacaggaaataacaaatttagccttcacatcaaccctacaaaataggttctgatgttatccccattttacagatggggaaattaaggcacaaagcagctaagtgacttaccctacacatcacatagctaatgaaatgcagagttgcaggattccaacccaggcagtctgatttcagatgataggcacttaactgttatactgtttcctctacaaaatgattttgaagaattattgaactataattaaactactttaaagggtattctctggactggtccaagatctaaccaacatgtgaataatttttatgtagaaaaagataaattttatgtccctctgccctggtaaaaattcagcagcactaggaactggttttctgccacatctttatggcaaggagcccactcagtgctgggagagggatggctacggtagcactgtgacttgatgactccgtcctctctcaccacacagttggaaatccctggctatccagaaaggagggaaatggcaactggggtatctgcccactgcaacctctaggctggctatttgtaggtgttttaaagtgggagaagtgacactaataactctgatcataactccaaaagcaatatgaagtggaaagaatgaggactctgaagttaggctgactggggtctgatacttatgttctggtactcgcaatgtgggcacctcctagctctctcatgaatatctgtgagaactgaacaaggtggtgtgagtaaagtgcctggcacagtgcaagatgtgcaaaatggactccaggtttccttctctgtggcctgtgtggtctgtactgcctttgaggggactcttcctgcagcccttgcctgcctgagcctgtgacgctcccttcatggtgctctcacacacagaagtcactataatgagcaatatgaactggtggtcctgccaatgaagatctgggggatttctgtaaagactccaggactcttgatgagacataagaagaggttccttattgaatgactgatatcagggaacaactcttaagaactgtgaaaccaaaattccagaagacacagcttgataatatgcaagacgactatcagtggtgaactccacttgacattttgagtagcggcaaccccattctggcattgcgtgtgtgcatgtgtgtgagctattaaccattctctccttaagcacatctgtattctggcccactcttagctggtaatattaagattttaaagggaaattttaaatttattgagggacattccaatgtccctaaatagctgtgcagcatttgactttgttcatacacactgcaccagccgctatgctaaagaacataaagactatctctgcatttaaacaacaaagagataatgtgagtttaatccccataatcaggttgttaacaaaaaatgtttaggctgaacattttacttaataccttacctttcgcaagtgtaacactcgcagaactcattattttctccaaagaacccatctccataataacaagaaatttcttctccaggttcaatgtctcttagagccttcacacatgctgtatctcgaccagttgacacaaactaaaataaaagtaactcagtaagaaactcacacctgaagcaaaaacaaaatacttgaagaaaatttttttaatgcttaccttacaattaggtctgcaatctgaaaaatgtccaaaagataaagtcaattaactgttgataagatctgaaacacgaacaattatagaaatctgaaataagctttccatataactttacaacttttgataggagtttaggtctcaagttcaactaaaggaatatacatttattttaataagtttgtggaaacatttctatttcaaattctcctttaaaggaagataaaggtttgactgaggttgacaaggccattctagcagttagcaggaatggccaacactagcgccaacaccttggaaacacagcttaccatggtttataaacgcagcaggacccagccagagttgagcacagtttttccttgtggagtacatgacactgaagtcgttttctccatgtctaagtagcatgttctcctcaatttctgaaagttcggcaatacaacccaccagtaattctattttgtcatttcgtttcctatttaaaatatgtgatgtgttaaaaattactagtaattaaatatagtaaggcttcttttaataaaataatcctgacaataaatatcagaaactgaaaaggcctagctgtctatactttagttagctcactgggatccccacctggctatcttctctcctaccctggagctccacagccttgtgccatggttacttgtgtacctatcttattcctgcaagagaatggaaactcaaccaggacagggactatgccacctatgtctctgaatgccctggtgtggtgttttgcaagcagaaagtactcaaatacttgcggcaatgaattaaactttctgactgctggatgaagcaggcagggaccagtggcagtaagggttatgaggatccggaatcatggtgccactctttagagcacaccatctgctaggaatataatgcaagccaaattttcaatcttaaattttttagcagccacattgagaaagttaagtgaatataggtgaaattactttaacaatttattttattttattttatttgagacggaatctcgctctgttgcccaggctggagtgcagtggcgtgatctcagctcactgcaacctctgcctcctgagttcaagtgattctcctgcctcagcctaagtagctgggactacaggtgtgtgccaccacacctagctcattttttttttttgtatttttactagagatggagtttcaccgtgttggccaggatggtctcgatttcttgacgtcatgatccgcccacctcagcctcccaaagtgctgggattacagatgagccaccatgcccagccaacaatatattttaacccaatatccaaaatacgatttcagtaggtaatataagaactatgaatgggaataaaatttaatatgaaatctggtgtgtatagcacacttacagcgcttctcaattcagactagctacatttcaaggactcaagggctggtggctactgtaccggacggtacagctctaggactctagatctcaaacctacacacccatctgcaacacagggagccacataatccaactagcaggctcaatacatcctgaggtaaatgaagcacatttcatgtacacacactcaccccagaggcctggcaataaagttcttttacctatccattttcagatatctgaccccccaaatttttgtggtagaaatatcagagggtgggtacatgaggagctacatgtttttcctgggagataacatagggaacaggcatgataggaaagaagatacagtagtatattctctttcatctgtaacttttatcccttttagctgggctcaactctgacttaattttgagatagagtctcactctattgcccaggctggagtgcagtggcgcgatctcagctcactatagcctctgtctcctgggttcaagtgattctcctgcctcagccacccgagtagctaggactacaggtgtgtgctaccacgcccagctaatttttgtatttttagtagagatggggtttcaccatgttggccaggctggtcttgaactcctgacctcaagtgatctgcctgcctcggcctcccaaagtgctgggattataggcgtgagccaatgccccccaccaactctactatttttattgaagctggcatatatacatatatatatatctgtatgtatgtatttttaagcaactaatgctttagggaggtttccacccataaaactaggatcattaaaactttagccccaacctttcttctaggccagtagaagactgactgtggaagccaggttatctaatcacggtatccacaactcttcagcaatcatatcactgaacaggcatccagagtcaataaaggaaaatgaaaagcaatttggcctagagatgggatctggttcaactgagacttccgatttccccactctgactccagctgatgggccaaggcaacggcgatgcattggctacttcagggtaaactctggcttcattccttaccatgaatttctcagcacttcaacaataatttagaagagaactttaaattaaattaaaggcttatactagtagaatagttaccactcttttgttgcaactattttggctccattttgttctgatgagtatctattacatggcaatatttcaaatccactgtcagttgcaaacattcgcaaataaataaatacctaaaacaggaaaaaaaaattgataatgactttaaatggtataccctgctagactttcttacaattataaaagcaaaccacccgcaatgatgaaaaaaatgtaagatctagcctgagcaacatagcgagaccctgtctctacgaaaaacattagccaagcatgatggcatgtacctttagtgccagctacgtgggaggctgagaggaagaatcacttgagcccaagagatggaagctgcagtgagccataatcaggccactgcactccagcctgggtgacagagcaagattctgcctctaaaaaaacaataaaataaacaaaaaaagtaagatcattaggtaacaaactttattgttactcaagagttttgaatgtcacaatttttctcattttgcaatatttgcattacagtaactagctgaacacctctaaacaaaaaattcaaaatcctcccatgagcatttcctttgagtgtcaggtcggtgttcaaaaagtttcagattttggagcatttcaaattttggggttaagggtactcactctgtatgagtacctaatggcttgtttcccttaaggctcataatgaatttcacctctatatgacaaagttttctctccttttttggttttagagacagggtcttgctctgtctcccagggctggagcgcagtggcatgatcatagctcagagcagcctctaactcttgggcacaagcaatgcttctggctctgcttcctgagtagccggaactacaaactacaaaggtacacactactatgcctagctaatttttttattcttatttttttagagatggagtcttgctatgttgcccaggctggtctcgaagtcctggcctcaagcaatactcccatcttagcccccacaaagtgctgggattacaagcatgagccactgagcctggcccagttttttctctggactgtcatccaaatgactgtatgtgttacaagatcttcagactgattagttttatgaaaaataaatttaaaatttcagtattaactaacatttagggttttaatttacttcactattcttatccaaataggttaacagcatcagtcttaataaacttacatgttctttgaataatttctcctgcattttattcttgttgagaaaatagtgccgtgcccattcgcctgaagtcaaacatttgaaggctttctccaagtgttcatctttcttaaaacgttcaattacttcctttagttcttcctgccttcctttaataggcctaaatctgaaagaaatcaaaagaatgaatgggttatctgccacaatccttgcgccactgatccatcttaacagatcttgagaaagagctaataccctaaaaacagccatggttatcagagcaaagatctaagagaagagaacaacaatcaatagtcttgattactactattcaagtaatactgatcacctggatacgcaagttctcttttttcaatctgttattttaatatttttatttcactgttatctcagtaacttctcttttttcaatctgttattttaattatttttatttcactgttatctcattaactgtgaggtgagcagacgattcaaacaaaagctgtctgattcagacttacactagtcgtcaactttgggagacacaaaatcaaagctctagaatacagcacacctaatttagagttagaatgacaagaatctttttaaaacatgcaaaatcaagctggaagagtgccaggcaatgaatttcagaagtatgatgatgtaaacaaaaccatgccatacacaaaaacattctttatgtacacagtcagaaaaaaccccaaactaagtattccaacaggcttcgaaacacaccttgatgttctaaccacccatgtcaaagtcatctttgatgactgcattcagagaacaaaacgagtacaagcagtgttaactctagtggtgaaattgctatactggtaatgtaggaaaactgatggggtagagttgttttttttttttttttttgagatggagtctcactctgtggcccaggctggagtgcagtggtgtgatcttggctcactgcaacctctgcctcccgggttcaagtgattctcttgcctcagcctcccatgtagctgggatgacaggcgtgcgccaccatgcccagctaatttttgtatttttagtagagaccatgttggccaggctggtcttgaactcctaacctcaagtggtctgcccaccttggcctcccaaagtgctgggattataggtgtgagccactgcgcctggcctgcaggggtagaattgaaaaggcttccattgtagaatcagccacactgatgtcttcagaatattatcccattaggtctgtatttatgcatgatgcagtcatggcccaagcaagacaaatttgtgaacccctcattctaaagctgtgttttcagtaaaacgtgtactataaagttactagcatcttaatttcaaattttcttttcatgtcaatttcataaagctaattctcccaaataaagtttttattttaaaaaaaagttttattttattttcataaagctaattctaaccggattatggcccggtatggtggctctcacctataatcccagcactttgggaggtcgaggcggatggatcacgaggtcaggagatcgagaccatcctggccaacctggtgaaaccccgtctctaaaatgcaaaaaattagccaggcccacgtagtggtacacgcctgtagtcctaggtactcaggaggctgaggcaggggaattgcttgaactcgagagttgaagttggagtgagccaagatcgcgtcactgcacttcagcctggtgacagagcaagactctgtatcaaaaaaacaaaacaaaacgtccaacagaaaaaaggaatcaccgattgccattcaaataaaatacattaagaaaaaatattagtggttcaggagaaaaaaatctttatgtgtcttactctgacatttaaaattgtacatttcataaacctgaatatgctaaaattgaggtaagatctagcacaaactccagcaaaggaagcattcagcagaattttttttcctagagaagctatcatatatgtattcatagtatttcagtaagatttcaagccacagtatttcatcaaggattattaggtgctgtgttgtgtatacagtggcatatgaagtgctatggtgaaaaatacaagagaagacatggccactgttcttgaatggaaaatttaattgggactaaaagacatatatatgcatcaaacagttaagcaagtgatcaatatgcaaatgcatgttaatatgctaaaaactgcattgctatagcacctaaaagtatagaaattataactagggtgcaaaatgtacatgggaaaggtttaagaaaagcacattataagcaggtaagaatcaaaaggaaggaagaatgaggggaagtctaagcagaagatcttaatcaagctggattcaaagagttgaccagggtcagctaggtagcaataataaagtaaagtaccagaatcaggaagaggaaagacatgaggtcctgaacaggtataatactgtttactggacaggatcactggaagacttcaggtgtattaatgcatactgatactaccaggaacttactagctacacactctagtcattttttttttaattcagtaatcctgaattctcacaactattagctgaaccatctgaaagttcaaacatatcctagagataatactgaagaaatgaacagggccctattttccattttcaatcaattggtatacaagcctttacagacagataaatgcaagtcctttaaacaattcagaacgtcttactagtctgtcgacatatggtgtcagagaaccaccatgaaaataaagagctgtagaattgggaaagcatccaaatatccatactcaactacttgtagccatcacaattgattgtgtcaagataccatctccaagaaatccaatggaaaccattcttgctgcaatcctacactacatggttatttgcacatgaaggacagataagacaacaaagcagctctcagctaaggcatgacctgtcgagcaatatgaaatatgaaatatgaaatggtgggaaacagataacccgtgctttgtgtggcaatcagaaaagcaatagttcactttaagcaaatgcaataaattatccatgccgttaaatgacagggctacaaacgacagaaagggccaagctatctttacacgttcaatgtgaaagtgaccaatgggaacattatacaaaagtaagttatagacctggaatgaaacttggctatttttaataggctttatgtgtgttctatgctttctgaaacaagttcattcctatctaaaaatgccttcaggtaaccttggttttgtttactttttattcataatgccaaacaatttacatgctaaaaccaacacaaaatagtcaactcttgatttagtagtattctgcctaccttccctgtgttgacttctgtttctgctttcctgactttattgcctcaaacataaataaaacccctgaaactatcccttgctaccaatagcaagaacctctatttcactaaaaatataagttgctgtcccaaacctgttaaaacttactgtcacagttggctgctatgggcatgaaatgacagtaaggaaaagggggaagaaaatggttaagggtgcagacaggcaggagatgagacagttgttttcaataatcctacagaagtatgtaaaagtcagctggctgatagtccaaatcaaatcccattgtaacaaatactgtggaaaataaaagttaagactgttatacctattagggctggtgcaaatgcactgaaaaccttagggaaatttttttttttcctattattgaacagaaaaataccctctctccttaactataatcactctaaatctcccatacaaactgcataaaactatccttttactctgacacttaaaggccagataatttagaacagcccttttgttccacaaatgaggaaaataaggcccaacaaggctgagtagattgccaatgacttagggttaatgaatggaagacctgggatttaccctggcctttctggttcctgttatatcacctggctcaggagagccttcctcacattgtttcatggttagaagaggatttgacttgcgtttgccattgaacatcagcactgggcccagccagagacagctctagcttgtatactgacaatacagtggaagggatggacgcaaatgtgaattttaaaatttcgtatttgggtgggggggtgggtgacaagggaggcaagaaaaacagttatttggcatttccaaaccaatatgccccgtcctccctcccttaatagaaaatttgctactttaaatcaaccaaacatatctattttttctctttttacacttccaatcaatggctggtataagaaaaataaaaatgtcatttacaattgattattattaaaggggcaggaaaaaaacatatgaattcacactcccacacacctgttccccactctttccagagactcacttcccaggttttcttgctatttggtttttctgtctccccactgtggcagtgaagaaaagttgtagactgtattagctgtgctactgtgcccttcattagcatgcacaatcaagagctgactggaggggtggggaacaggaaggggaacagaaaaaagggagacagggaaggagagaggaagagagaaaaatgctcaaatatttaagatataaaataaaaccatgaggcaacatagtgaacacatttccccctctgaagaaagtttagctgcaaatccacagtttgtagacgctgagtgaggagtcgcagatcagctcttcagtccttcttgacctgaaaataaacgagaaccaaaaacatacctggctgagtcctgcaatcagtgctcagctaatcacatggagtgactcctgatcttttgaagaatgatttgtttctcttaaaatcaccctgttatgaagtacaagtggttttttaaaaaatacaactattatcaaactactttaaaaggtttgtaaaatgttctaaaactctaatttatgctgacacttcaaattacttaacataaaagaacattttaaaaggctagaatgggttagtcagtatctcattgtttttaacacacactacctacctcacagggttgttgtgagaaaaactgtcagattttgaaaaatgccttgagctcctcgaaggaaaggcgctatataaatgcaaaaacaaacaacaaaaataaaaagctatttgtataatctgtacttgtaatttctaaacagacttacaatattcgttgttgcaaaaatctttaaaactctgtgataatcaagaactttaagataccacaggtgggcgcggcaggatagaagccatgctgctgaaattctctgcttcccatagaacacaccttaccatgaagttagaagctttgaaaacattctttacggattctagtcaagcacttaattttaaaatgatatttaaagtgattcatattcatatccaatagtggatatgaataatcaaatacatataaaagtgaaataaaaattagatggttataacagtagaaaaatgagtaaggactgtacaggctgacattctgattagaaaaccaagaaaagttgaaaagagaaactcagtgccctgaagtgactcccctgatgtttaaatgctgtctcctgctcagctcactgctggcctgagtcgccttcgcgcctcaggatactgtgacatctcagggtcatgcagcctcaaaaagggggcattactgaaagcatcgatccctttcttaaaatatcccgctcccactccatttaaaaaccagaggtataaacaacaactctttttttcttgttaaaaagaaaactttaggtttcataattgacaaaagtcaattaagttcaaatttctcccaataaattgaaattagcattttgttcgtactatttctaagtattcatgctacaactcttgcttgttagtaaatgtaaggatatattaagattaaaacctgtgcactcaaaacatagccagttttgaaaattctccaatcattaaacatctactctttcttttttcttttttttttttttttggagatagagtctcactctgttgcccaggctggagtgcagtggtgtgatctaggctcactgcaacctctgcctcccaggttcaagttattcgcctgcctcaaactcttgagtagctgggattacgggcacgcaccaccatgcctggctaatttttgtatttttagtagagacggggtttcaccatgttggtcaggctggtgtcgaacacctgacctcgtgatccacccgcctcggcctcccaaagtgctggaattacaggcgtgagccatcacgcccgggctaaacatctactgtttctaaacattcttcctgttggtagactgaaagaagtaaaaggaagggaaaagagtataaaaaagagaaactaaaaagtgacaaattacaggtgcataaacatatgaacaaagagcgcactatacaaggaacaggcagagagcttagaaaattaaaatccaagagcagtacatcttctggtcacttcttttgcaccccaaagagagagaagtccataaactaacaatttaagaagtatttattggctatttactaccttaattaagcattatcagttttccttattttctaaagtcacattctggtaaattcttgctcaaaagatgaagagctagaagggatagttttattttcaagtaaattcactaaggttaattgaaaacatatacctttcaccaagattattgtaaaggtcattaataaagtttctgttcccaaatatcagtgtacacaagagtgtaaaagcacacgtaaacggaacactctggtgggaagtaggcaggccgtcccctgcactcccacaccggcctgaagtgctggcattgctaggaacccaggctgctctaaccagggcaacagaatcgtctgtacttccacaggttattttaggaactgtataattaaatgttggactaaaaaatacttaaaaaatgatttcttctgcaagtttaaccagctttaattttagatgcttcaattctatggggaaaaatcttaggcactgggtgcattttaacttaggagtcctcagttaatgtcttgagttccaaaaatatttgtgtggtaatcctgaagtttacatttatgactacatagttttacgtgagccctaggaaactcctagtaaggtatttttatccacttagcacgtcacaatgaaactgagaggccagatgttttaggacctagctattccaagtgtagtctgggagcttgttagaaaggcacaatctcaggccccaccccaaagctactgaatcagagcctgcatttcaacaaactcccaggtgactctcatgtaaactaattataagaagcaatggtataggaggacttttacagaaaactggagtgcttccttttgttttttaatatagggtttcactctgtggcccaggctggagtgcagtggtatgaatacagctcattgcagcctcgagctcctgggctccagtgatcctcccaccttgccctcccaaagtgctgggattacaggcatgagccactgcagcagaaaactggagtatttactattgaagatgccagtaacaggcagccttctggaatacggcacggggattttagagtacatgaagttctgtcataagccactaaaactttcattgtaattttttttttttttttttgagactgagtttcgctcttgttgcccaggctggagtgcagtggcgcaatctcggctcaccacaacctctgcctcccaggttcaagcgattctcctgcctcggcctcctgagtagctgggagtacaggcatgtgccaccacgcctggctaaattttgtatttttagtagagacggggttttccatgttggtcaggctggtcttgaactcccgacctcaggtgatccgcccacctcagcctcccaaagtgctgggattacaggcgtgagccaccgcacctggcccattgtaattctgatgtaacgctgttttatatgcttccatatcttggtaataaggcataatcaatataactttcttgatgaccccaggtcaagattctgggcctttgtggtgacattctgaatgccactagactactgtgtcaaagagtgattcattcacacattcacatttcttaactcaaaaaaaaaaaaaacaaagaaaaacactgggggtgctacagggtgacaaatattatcagcatcttctaggagaatgagcactggtctcatgttcaatgggcaaaaaaaaagaaaagaaaagaaaatggacttaaaataatgcaaattagttttttgtttttagccggagtcacgctctgttgcccaggctggagtgcagtggcgcgatcccagctcactgcaacttccacctcccaggttcgagggattctcctgcctcagccttccgagtagctgggactacaggcgcatgtggccaggcccagctaattttttgtatttttagtagagacggggtttcagcatgttggccaggctggtctcgaactcctgagctcaggtgatccacccacctcggcctcccaaagtgctgggattacaggcatgagctaccatgcccagtcctgtatcttttttttttttttgaggcagtctcactttgttacccaggctggagtgcagtgatgtgatcttggttcactgcaacctctgtctcccgggttcacgtgattctcctgcctcagcctcctgagtagccaggactacaggtgtgcaccaccacacccagctaatttttgtatttttagtagagatgggatttcatcatgttggccaggctggtctcgaactcctgacctctggtgatccacccagcttggcctcccaaagtgctgagattacaggcatgagccactgcgcccagcctggatcttaatcaatcagggcatccaatggcagtcatttggcagggaactgtttaaataatcccccaactccattccaatatttcacacttcattttagtaggtaaagatatatgacagaaaattttatggtcagacatggtggctcacgtctataatcccagcactttgggaggctgaggcaggtggatcacctgaggtcaggagtttcaagaccagcctggtcaacatggtgaaacctcatctacactaaaaatacaaaaattagctgggtgcagtggtgcacgcctgtaatcccagctacttgggaaactgaggcagaagaatcacttgaacccagaaggtggaggttgcagtgagctgagatcatgccactgcactccagtctgggcgacagagtgagactccatctaaaaaagaaaagaaaaaaaaatttatgaaaaaaacaaaagcatatttttacctgaattacttcttttggatttagactgtaattgataagtgaggcatatagtatcttaattctagcaagggataaaattaaaaggggggaaacaggacacaagactttcctctaattacctgtactcaccaattcctacctctcccaactactgatcagtgaccacctacctgggtatcaagttcccccagggttgccactaaaatcagaactatataaccccagtccgggtgtgatggagatgaaagtgatgggccagaactagctctatcttctaaatccctgctgttatgcttttccaccaggctaaaaaaccctttgccatagaggttaagagacaaagcaaagttgcaaagctctgacctgtttggtggcagatacatttgtgaaatgatctaatggtcttttttgagggagaaatggtatttaagagaattaaagagagacctcagctgttaaaagatgacagatttcaagattaatgtaataatgttttttatatacagcatttggtactcaaaacacttacacatccactttcttacctgcatactgaatataaacatgtctttaaaactattcgctcttaaataattagctgaatcccaaagattaaacatgatgacaaaattccccatctatacagagacaacgtgtaagagaaaagtctataataaaatcatgaaaaaaagggatgtaccctactttaggttggaaataatcatacactttcaaggtgttacaggatgcttgtcagatttttcttttcgctaagataattgtcatcacctttttttttttgagatggagtttcgctcttgttgcccagactggagtgcaatggcacgatctcggctcactgcaacctccgcctcccgggttcaagtgattctcctgcctcagcctcccaagtagctgggattacaggcatgtgccacctgcctggctaattttttttgtacttttagtagagacagggtttcaccatgttggtcaggctggtctcaaactcctgacctcaggtgatccacccaccttggcctcccaaagtgtggggattacaggcgtgagccaccatgcctggcatcatcaacttttaaaatagaacatgaggatgctcctccagctttatacgttaatagaaatgttctgaggtaaaataagaacacagagttagaactgacaagattcctggagtcttttctctgcttctcttggctcacagacagaaaacccttccactgcaaagaactttcctttaatgtcattttaaattttgagcaaaagtaaaattagccatctatgttcttgaattcaacataatcatctgttccattcaggataaagactgaaaattacctagtattcattttgtgtgtttgaaaacctaaatagggatcaagaaccaaactggttgctaggtcatcattttcacagagttccttggcggacattccagaggatggtacatagcgactctgtccttcaaatcccgagttaccattacctgtgaaaagcaaaagcaagaaaaattactcaaattgaaaactacttaaatctgccttaaaatctt

1. A composition comprising at least two polynucleotides selected from the group consisting of:
(a) a polynucleotide comprising the human genomic fragment present in the CTD-2162L23 BAC (SEQ ID NO:1) or a variant thereof which hybridizes under stringent conditions to said polynucleotide,
(b) a polynucleotide comprising the human genomic fragment present in the RP11-314K20 BAC (SEQ ID NO:2) or a variant thereof which hybridizes under stringent conditions to said polynucleotide,
(c) a polynucleotide comprising the human genomic fragment present in the CTD-2655K5 BAC (SEQ ID NO:3) or a variant thereof which hybridizes under stringent conditions to said polynucleotide and
(d) a polynucleotide comprising the human genomic fragment present in the CTC-783C1 BAC (SEQ ID NO:4) or a variant thereof which hybridizes under stringent conditions to said polynucleotide
wherein said polynucleotides are not associated with all or a portion of a polynucleotide in which the isolated polynucleotide is found in nature.

2. Composition according to claim 1 wherein one or more of the polynucleotides are provided in BACs.

3. Composition according to claim 2 wherein the BACs are the CTD-2162L23, RP11-314K20, CTD-2655K5 and CTC-783C1 BACs.

4-6. (canceled)

7. An in vitro method for predicting the outcome of a subject suffering from cancer comprising detecting whether the CHKA gene is amplified in a sample from said subject, wherein amplification of the CHKA gene is indicative of an unfavourable outcome of the subject.

8. Method according to claim 7 wherein detecting the amplification of the CHKA gene comprises determining the copy number of the CHKA gene.

9. Method according to claim 8 wherein more than 2 copies of the CHKA gene is indicative of the subject suffering from cancer or of an unfavourable outcome of the subject.

10. Method according to claim 7 wherein the detection of the amplification is carried out using as at least two BACS selected from the group of the CTD-2162L23, RP11-314K20, CTD-2655K5 and CTC-783C1 BACs.

11. Method according to claim 7 wherein the cancer is selected from the group of breast cancer, colon cancer, lung cancer, bladder cancer and prostate cancer.

12. Method according to claim 11 wherein lung cancer is non-small cell lung cancer (NSCLC).

13. Method according to claim 12, wherein the NSCLC is selected from squamous cell carcinoma of the lung, large cell carcinoma of the lung and adenocarcinoma of the lung.

14. Method according to claim 13, wherein the NSCLC is advanced NSCLC, preferably, stage IIIA, IIIB or IV NSCLC.

15. Method according to claim 7, wherein the sample is a tumour tissue sample.

16. A method for determining the copy number of the CHKA gene which comprises:
a. contacting a sample containing genetic material with a composition comprising at least two polynucleotides selected from the group consisting of:
(i) a polynucleotide comprising the human genomic fragment present in the CTD-2162L23 BAC (SEQ ID NO:1) or a variant thereof which hybridizes under stringent conditions to said polynucleotide,
(ii) a polynucleotide comprising the human genomic fragment present in the RP11-314K20 BAC (SEQ ID NO:2) or a variant thereof which hybridizes under stringent conditions to said polynucleotide,
(iii) a polynucleotide comprising the human genomic fragment present in the CTD-2655K5 BAC (SEQ ID NO:3) or a variant thereof which hybridizes under stringent conditions to said polynucleotide and
(iv) a polynucleotide comprising the human genomic fragment present in the CTC-783C1 BAC (SEQ ID NO:4) or a variant thereof which hybridizes under stringent conditions to said polynucleotide
wherein said polynucleotides are not associated with all or a portion of a polynucleotide in which the isolated polynucleotide is found in nature wherein said contacting is carried out under conditions adequate for the hybridisation of the polynucleotides forming part of the composition with the CHKA gene or genes present in the sample; and
b. determining the copy number of the CHKA gene based on the hybridisation of the composition with the sample containing genetic material.

17. Method according to claim 16 wherein the determination of the copy number of the CHKA gene is carried out by in situ hybridisation.

18. Method according to claim 16 wherein one or more of the polynucleotides of the composition used in step a. are provided in BACs.

19. Method according to claim 18 wherein the contacting step is carried out using a composition comprising the polynucleotides comprising the genomic fragment present in the CTD-2162L23, RP11-314K20, CTD-2655K5 and CTC-783C1 BACs.

20. Method according to claim 19 wherein the contacting step is carried out using a composition comprising at least two BACs selected from the group consisting of the CTD-2162L23, RP11-314K20, CTD-2655K5 and CTC-783C1 BACs.
